(19) United States
(12) Patent Application Publication
(10) Pub. No.: US 2021/0254173 A1
(43) Pub. Date: Aug. 19, 2021

(54) PREDICTIVE 7-GENE ASSAY AND PROGNOSTIC PROTEIN BIOMARKER FOR NON-SMALL CELL LUNG CANCER

(71) Applicant: West Virginia University, Morgantown, WV (US)

(72) Inventor: Nancy Lan Guo, Morgantown, WV (US)

(21) Appl. No.: 17/251,359

(22) PCT Filed: Jun. 13, 2019
(86) PCT No.: PCT/US2019/036953

§ 371 Date: Dec. 11, 2020

Related U.S. Application Data
(60) Provisional application No. 62/685,410, filed on Jun. 15, 2018.

(51) Int. Cl. C12Q 1/6886; G01N 33/574; A61K 33/243; A61K 31/282; A61P 35/00

(52) U.S. Cl. CPC C12Q 1/6886; G01N 33/57423; A61K 33/243; C12Q 2600/158; A61P 35/00; C12Q 2600/106; A61K 31/282

(57) ABSTRACT

A method of providing a treatment to a patient having non-small cell lung cancer is provided comprising extracting total RNA from a tumor of non-small cell lung cancer of a patient after the surgical resection, generating complementary DNA (cDNA) of the extracted total RNA from the patients tumor, quantifying of mRNA expression of 7 genes of ABCC4 (SEQ ID NO:1), CCL19 (SEQ ID NO:2), SLC39A8 (SEQ ID NO:3), CD27 (SEQ ID NO:4), FUT7 (SEQ ID NO:5), ZNF71 (SEQ ID NO:6), and DAG1 (SEQ ID NO:7), normalizing of the quantification of the 7 genes with the quantification of a control gene UBC (SEQ ID NO:8), and utilizing the normalized 7 gene mRNA expression quantification to determine whether the patient will benefit from receiving adjuvant chemotherapy or not.

### CROSS-REFERENCE TO RELATED APPLICATION

[0001] This patent application claims the benefit of co-pending U.S. Patent Application Ser. No. 62/685,410, filed Jun. 15, 2018. The entire contents of U.S. Patent Application Ser. No. 62/685,410, is incorporated by reference into this patent application as if fully written herein.

### STATEMENT REGARDING FEDERALLY SPONSORED RESEARCH OR DEVELOPMENT

[0002] This invention was made with government support under National Institute of Health Grants R01/R56LM009500, P20RR16440 ARRA Supplement, and R01ES021764, and P20GM103434. The government has certain rights in the invention.

### SEQUENCE LISTING

[0003] A SEQUENCE LISTING in computer-readable form (.txt file) accompanies this application having SEQ ID NO:1 through SEQ ID NO:10. The computer-readable form (.txt file) of the SEQUENCE LISTING is incorporated by reference into this application.

### BACKGROUND OF THE INVENTION

### 1. Field of the Invention

[0004] This invention relates to a method of providing a treatment to a patient having non-small cell lung cancer comprising extracting total RNA from a tumor of non-small cell lung cancer of a patient after the surgical resection, generating complementary DNA (cDNA) of the extracted total RNA from said patient tumor, quantifying of mRNA expression of 7 genes of ABCC4 (SEQ ID NO:1), CCL19 (SEQ ID NO:2), SLC39A8 (SEQ ID NO:3), CD27 (SEQ ID NO:4), FUT7 (SEQ ID NO:5), ZNF71 (SEQ ID NO:6); and DAG1 (SEQ ID NO:7), normalizing of the quantification of said 7 genes with the quantification of a control gene UBC (SEQ ID NO:8), and utilizing said normalized 7 gene mRNA expression quantification to determine whether said patient will benefit from receiving adjuvant chemotherapy or not. This invention also relates to a method of providing a treatment to a patient having non-small cell lung cancer comprising providing protein expression of SEQ ID NO:9 (protein ZNF71) or SEQ ID NO:10 (protein CD27) and quantifying said protein expression with ELISA correlated with either said CD27 mRNA expression or ZNF71 mRNA in a patient tumor and a cancer-free tissue adjacent to said tumor, and determining a prognosis of said patient from said protein expression.

### 2. Background Art

[0005] Lung cancer is the leading cause of cancer-related deaths in the world, and non-small cell lung cancer (NSCLC) accounts for almost 80% of lung cancer deaths [1]. Major histology of NSCLC includes lung adenocarcinoma and squamous cell lung carcinoma. Surgical resection is the major treatment for early stage NSCLC. However, about 22-38% of stage I NSCLC patients will develop tumor recurrence within five years following the surgery [2]. It is therefore important to select early stage NSCLC patients for more aggressive treatment. While adjuvant chemotherapy of stage II and stage disease has resulted in 10-15% increased overall survival [3], the prognosis for early stage NSCLC remains poor [4]. Currently, there are no clinically available molecular assays to predict the risk for tumor recurrence and the clinical benefits of chemotherapy in NSCLC patients.

[0006] Immunotherapy has rapidly gained attention of oncologists as an effective and less toxic treatment than chemotherapy in patients with advanced lung cancers [5-7]. A recent study used paired single cell analysis to compare normal lung tissue and blood with tumor tissue in stage I NSCLC, and found that early-stage tumors had already begun to alter the immune cells in their microenvironment [8]. These results suggest that immunotherapy could potentially be used to treat early stage lung cancer patients. However, predictive biomarkers of immunotherapy are not well established except PD-1/PD-L1, and it is unlikely that a single marker is sufficient.

[0007] High-throughput technologies, such as microarray and RNA-seq, promise the discovery of novel biomarkers from genome-scale studies. The FDA conducted a systematic evaluation and suggested continued usefulness of legacy microarray data and established microarray biomarkers and predictive models in the forthcoming RNA-seq era [9]. However, several disadvantages have limited the application of high-throughput techniques in routine clinical tests, including costs, reproducibility, and data analyses [10]. Compared with microarray/RNA-seq, quantitative real-time RT-PCR (qRT-PCR) is more efficient, consistent, and able to measure gene expression over a greater dynamic range [11]. The combined use of real-time qRT-PCR with high-throughput analysis can overcome the inherent biases of the high-throughput techniques and is emerging as the optimal method of choice to translate genome research into clinical practice [12]. The protein expression validation of the identified mRNA biomarkers could substantiate their ultimate functional involvements in disease, and may lead to the discovery of potential proteomic biomarkers in abundant FFPE samples for broader applications in community hospitals.

[0008] DNA microarray-based studies identified gene expression-based NSCLC prognostic [13] and predictive biomarkers [14, 15]. A qRT-PCR based 14-gene assay by Kratz et al [16] is prognostic of non-squamous NSCLC outcome in FFPE tissues and is ready for wide-spread clinical applications. However, this 14-gene assay is limited to non-squamous NSCLC and is not shown to be predictive of the clinical benefits of chemotherapy.

### SUMMARY OF THE INVENTION

[0009] The present invention provides a multi-gene assay predictive of the clinical benefits of chemotherapy in non-small cell lung cancer (NSCLC) patients, and provides for their protein expression as therapeutic targets.

[0010] This invention discloses a method using a 7-gene assay ABCC4 (SEQ ID NO:1), CCL19 (SEQ ID NO:2), SLC39A8 (SEQ ID NO:3), CD27 (SEQ ID NO:4), FUT7 (SEQ ID NO:5), ZNF71 (SEQ ID NO:6), and DAG1(SEQ ID NO:7) for selecting adjuvant chemotherapy treatment for a patient with non-small cell lung cancer after their surgery. This treatment method using the 7-gene assay can predict a patient tumor as either with benefit from adjuvant chemotherapy or no benefit from adjuvant chemotherapy after receiving surgery. In the published data of the 7-gene assay, it is shown that for those patients who were predicted as with benefit from chemotherapy, their disease specific-survival was significantly (p<0.05) longer in those who actually received adjuvant chemotherapy compared with those who did not receive adjuvant chemotherapy. In the contrast, for those patients who were predicted with the 7-gene assay as no benefit from adjuvant chemotherapy, their disease-specific survival was actually shorter when they received adjuvant chemotherapy compared with those who did not receive adjuvant chemotherapy, due to unnecessary chemotherapeutic treatment and associated cytotoxicity side-effects (see FIG. 1). The adjuvant chemotherapy included in the studied patient cohorts comprises Cisplatin and Taxol, Cisplatin and Taxotere, Carboplatin, Carboplatin and Taxol, Carboplatin and Taxotere, Taxol, and Alimta (pemetrexed).

[0011] Within the 7-gene assay, 4 genes, ABCC4 (SEQ ID NO:1), FUT7 (SEQ ID NO:5), ZNF71 (SEQ ID NO:6), and SLC39A8 (SEQ ID NO:3), each individually predicted chemosensitivity or chemoresistance to specific adjuvant chemotherapy (see Table 2). Specifically, high expression of ABCC4 (SEQ ID NO:1) predicted chemoresistance to Carboplatin and Taxol, Taxol, Carboplatin and Taxotere, Cisplatin and Taxetere, and Cisplatin and Taxol. High expression of FUT7 (SEQ ID NO:5) predicted chemosensitivity to Carboplatin. High expression of ZNF71 (SEQ ID NO:6) predicted chemosentivity to Carboplatin and Taxol, Carboplatin and Taxotere, Cisplatin and Taxotere, and Cisplatin and Taxol. High expression of SLC39A8 (SEQ ID NO:3) predicted chemoresistance to Taxol and Alimta (pemetrexed).

[0012] The protein expression of ZNF71 (SEQ ID NO:9) quantified with automated quantitative analysis (AQUA) correlated with its mRNA expression in patient tumors. The protein expression of ZNF71 (SEQ ID NO:9) can independently classify patients into prognosis (longer survival) group or poor prognosis (shorter survival) group (see FIG. 2).

[0013] The protein expression of CD27 (SEQ ID NO:10) quantified with ELISA had a significant correlation with its mRNA in patient tumors and adjacent normal lung tissues, and could be an independent protein biomarker for patient prognosis and treatment selection (see FIG. 3).

[0014] An embodiment of this invention provides a method of providing a treatment to a patient having non-small cell lung cancer comprising extracting total RNA from a tumor of non-small cell lung cancer of a patient after the surgical resection; generating complementary DNA (cDNA) of the extracted total RNA from said patient tumor; quantifying of mRNA expression of 7 genes of ABCC4 (SEQ ID NO:1), CCL19 (SEQ ID NO:2), SLC39A8 (SEQ ID NO:3), CD27 (SEQ ID NO:4), FUT7 (SEQ ID NO:5), ZNF71 (SEQ ID NO:6); and DAG1 (SEQ ID NO:7); normalizing of the quantification of said 7 genes with the quantification of a control gene UBC (SEQ ID NO:8); and utilizing said normalized 7 gene mRNA expression quantification to determine whether said patient will benefit from receiving adjuvant chemotherapy or not. In a preferred embodiment of this method, the method further comprises administering to said patient a therapeutically effective amount of one of the following adjuvant chemotherapies (a) Cisplatin and Taxol, (b) Cisplatin and Taxotere, (c) Carboplatin, (d) Carboplatin and Taxol, (e) Carboplatin and Taxotere, (f) Taxol, and (g) Alimta (pemetrexed). In a more preferred embodiment of tis method, this method comprises the quantification of mRNA expression of three genes of ABCC4 (SEQ ID NO:1), CCL19 (SEQ ID NO:2), and SLC39A8 (SEQ ID NO:3). In another preferred embodiment of this invention, the method, this method comprises the quantification of mRNA expression of four genes of CD27 (SEQ ID NO:4), FUT7 (SEQ ID NO:5), ZNF71 (SEQ ID NO:6), and DAG1 (SEQ ID NO:7).

[0015] Another embodiment of this invention provides the method, as described above, wherein said quantification of mRNA expression of ABCC4 (SEQ ID NO:1) and utilization of said normalized ABCC4 gene mRNA expression quantification to determine whether said patient will benefit from receiving adjuvant chemotherapy of one of (a) Cisplatin and Taxol, (b) Cisplatin and Taxotere, (d) Carboplatin and Taxol, (e) Carboplatin and Taxotere, and (f) Taxol.

[0016] Another embodiment of this invention provides the method, as described above, wherein said quantification of mRNA expression of FUT7 (SEQ ID NO:5) and utilization of said normalized FUT7 gene mRNA expression quantification to determine whether said patient will benefit from receiving adjuvant chemotherapy of Carboplatin.

[0017] Another embodiment of this invention provides the method, as described above, wherein said quantification of mRNA expression of ZNF71 (SEQ ID NO:6) and utilization of said normalized ZNF71 gene mRNA expression quantification to determine whether said patient will benefit from receiving adjuvant chemotherapy of (a) Carboplatin and Taxol, (b) Carboplatin and Taxotere, (c) Cisplatin and Taxotere, and (d) Cisplatin and Taxol.

[0018] Another embodiment of this invention provides the method, as described above, wherein said quantification of mRNA expression of SLC39A8 (SEQ ID NO:3) and utilization of said normalized SLC39A8 gene mRNA expression quantification to determine whether said patient will benefit from receiving adjuvant chemotherapy of one of (a) Taxol, and (b) Alimta (pemetrexed).

[0019] In another embodiment of this invention a method of providing a treatment to a patient having non-small cell lung cancer, is disclosed, comprising providing protein expression of ZNF71 (SEQ ID NO: 9); quantifying said protein expression of said ZNF71 (SEQ ID NO:9) with automated quantitative analysis (AQUA) correlated with said ZNF71 (SEQ ID NO:9) mRNA expression in a patient tumor; and determining a prognosis of said patient from said protein expression of said ZNF71 (SEQ ID NO:9). In another embodiment of this method, the method includes wherein said prognosis of said patient is either longer survival or shorter survival.

[0020] In another embodiment of this invention, a method of providing a treatment to a patient having non-small cell lung cancer, is disclosed, comprising providing protein expression of CD27 (SEQ ID NO:10); quantifying said protein expression of said CD27 (SEQ ID NO:10) with ELISA correlated with said CD27 (SEQ ID NO:10) mRNA expression in a patient tumor and a cancer-free tissue adjacent to said tumor; and determining a prognosis of said patient from said protein expression of said CD27 (SEQ ID NO:10). In another embodiment of this method, the method includes wherein said prognosis of said patient is either longer survival or shorter survival. This method, optionally, includes administering to said patient a therapeutically effective amount of an adjuvant chemotherapy.

### BRIEF DESCRIPTION OF THE DRAWINGS

[0021] FIG. 1A shows a patient stratification in training cohort CWRU of a Kaplan-Meier analyses of the 7-gene model of this invention.

[0022] FIG. 1B shows a CWRU high-risk group of a Kaplan-Meier analyses of the 7-gene model of this invention.

[0023] FIG. 1C shows a CWRU low-risk group of a Kaplan-Meier a of the 7-gene model of this invention.

[0024] FIG. 1D shows a validation set of a Kaplan-Meier analyses of the 7-gene model of this invention.

[0025] FIG. 1E shows a validation set high-risk group of a Kaplan-Meier analyses of the 7-gene model of this invention.

[0026] FIG. 1F shows a validation set low-risk group of a Kaplan-Meier analyses of the 7-gene model of this invention.

[0027] FIG. 2a shows a Kaplan-Meier analyses of ZNF71 (SEQ ID NO:9) protein expression quantified by AQUA, wherein ZNF71 (SEQ ID NO:9) immunofluorescence images of different expression levels in TMA.

[0028] FIG. 2b shows patients were stratified into two groups based on ZNF71 (SEQ ID NO:9) AQUA scores. Patients with logₑ(ZNF71 ((SEQ ID NO:9)) AQUA Score)>7.9 had a low-risk and those with logₑ(ZNF71 ((SEQ ID NO:9)) AQUA Score)<7.9 had a high-risk for tumor metastasis in training cohort YTMA250.

[0029] FIG. 2c shows a validation cohort YTMA79, P values were assessed with Wilcoxon tests.

[0030] FIG. 3a shows a comparison of mRNA and protein expression of CD27 (SEQ ID NO:10) in NSCLC patient samples, wherein a scatterplot with regression line for CD27 mRNA (relative quantity) in qRT-PCR and protein expression (pg/mL) in ELISA assays of 29 NSCLC tumor resections. RQ: relative quantity, measured as 2-^{Act} values in qRT PCR with UM as the control gene. R: Spearman correlation coefficient.

[0031] FIG. 3b shows a comparison of CD27 (SEQ ID NO:10) fold-change in NSCLC vs. normal lung tissues and high-risk vs. low-risk NSCLC tumors in qRT-PCR and ELISA assays. High-risk NSCLC patients had a poor survival outcome and low-risk NSCLC patients had a good survival outcome. Bar plot shows mean+SE. *: P<0.05.

[0032] FIG. 4a shows the 7-gene prognostic and predictive NSCLC model wherein the 7-gene model is in decision-tree format.

[0033] FIG. 4b shows the 7-gene prognostic and predictive model in rule-base format.

[0034] FIG. 5A shows the molecular network and pathway analysis in Ingenuity Pathway Analysis (IPA), namely, top molecular network of 7 NSCLC biomarkers in IPA analysis,

[0035] FIG. 5B shows the top molecular pathways of the 7-gene signature of this invention in IPA analysis.

[0036] FIG. 6 shows DNA copy number variation of the 7 signature genes of this invention in NSCLC (n=271). The DNA copy number data is available in NCBI Gene Expression Omnibus with accession number GSE31800, The CGHCall package in R was used in the analysis.

### DETAILED DESCRIPTION OF THE INVENTION

[0037] An embodiment of this invention provides a method of providing a treatment to a patient having non-small cell lung cancer comprising extracting total RNA from a tumor of non-small cell lung cancer of a patient after the surgical resection; generating complementary DNA (cDNA) of the extracted total RNA from said patient tumor; quantifying of mRNA expression of 7 genes of ABCC4 (SEQ ID NO:1), CCL19 (SEQ ID NO:2), SLC39A8 (SEQ ID NO:3), CD27 (SEQ ID NO:4), FUT7 (SEQ ID NO:5), ZNF71 (SEQ ID NO:6); and DAG1 (SEQ ID NO:7); normalizing of the quantification of said 7 genes with the quantification of a control gene UBC (SEQ ID NO:8); and utilizing said normalized 7 gene mRNA expression quantification to determine whether said patient will benefit from receiving adjuvant chemotherapy or not. In a preferred embodiment of this method, the method further comprises administering to said patient a therapeutically effective amount of one of the following adjuvant chemotherapies (a) cisplatin and Taxol (paclitaxel), (b) cisplatin and Taxotere (docetaxel), (c) carboplatin, (d) carboplatin and Taxol, (e) carboplatin and Taxotere, (f) Taxol, and (g) Alimta (pemetrexed). Taxol is a registered trademeark owned by Bristol-Myers Squibb Company, New York, N.Y., USA; Taxotere is a registered trademark owned by Aventis Pharma S.A., Cedex, France; and Alimnta is a registered trademark owned by Eli Lilly and Company, Indianapolis, Ind., USA. In a more preferred embodiment of this method, this method comprises the quantification of mRNA expression of three genes of ABCC4 (SEQ ID NO:1), CCL19 (SEQ ID NO:2), and SLC39A8 (SEQ ID NO:3). In another more preferred embodiment of this method, this method comprises the quantification of mRNA expression of four genes of CD27 (SEQ ID NO:4), FUT7 (SEQ ID NO:5), ZNF71 (SEQ ID NO:6), and DAG1 (SEQ ID NO:7).

[0038] Another embodiment of this invention provides the method, as described above, wherein said quantification of mRNA expression of ABCC4 (SEQ ID NO:1) and utilization of said normalized ABCC4 (SEQ ID NO:1) gene mRNA expression quantification to determine whether said patient will benefit from receiving adjuvant chemotherapy of one of (a) cisplatin and Taxol, (b) cisplatin and Taxotere, (d) carboplatin and Taxol, (e) carboplatin and Taxotere, and (f) Taxol.

[0039] Another embodiment of this invention provides the method, as described above, wherein said quantification of mRNA expression of FUT7 (SEQ ID NO:5) and utilization of said normalized FUT7 (SEQ ID NO:5) gene mRNA expression quantification to determine whether said patient will benefit from receiving adjuvant chemotherapy of Carboplatin.

[0040] Another embodiment of this invention provides the method, as described above, wherein said quantification of mRNA expression of ZNF71 (SEQ ID NO:6) and utilization of said normalized ZNF71 (SEQ ID NO:6) gene mRNA expression quantification to determine whether said patient will benefit from receiving adjuvant chemotherapy of (a) carboplatin and Taxol, (b) carboplatin and Taxotere, (c) cisplatin and Taxotere, and (d) cisplatin and Taxol.

[0041] Another embodiment of this invention provides the method, as described above, wherein said quantification of mRNA expression of SLC39A8 (SEQ ID NO:3) and utilization of said normalized SLC39A8 (SEQ ID NO:3) gene mRNA expression quantification to determine whether said patient will benefit from receiving adjuvant chemotherapy of one of (a) Taxol, and (b) Alimta (pemetrexed).

[0042] In another embodiment of this invention a method of providing a treatment to a patient having non-small cell lung cancer, is disclosed, comprising providing protein expression of ZNF71 (SEQ ID NO: 9); quantifying said protein expression of said ZNF71 (SEQ ID NO:9) with automated quantitative analysis (AQUA) correlated with said ZNF71 mRNA expression in a patient tumor; and determining a prognosis of said patient from said protein expression of said ZNF71 (SEQ ID NO:9). In another embodiment of this method, the method includes wherein said prognosis of said patient is either longer survival or shorter survival.

[0043] In another embodiment of this invention, a method of providing a treatment to a patient having non-small cell lung cancer, is disclosed, comprising providing protein expression of CD27 (SEQ ID NO:10); quantifying said protein expression of said CD27 (SEQ ID NO:10) with ELISA correlated with said CD27 mRNA expression in a patient tumor and a cancer-free tissue adjacent to said tumor; and determining a prognosis of said patient from said protein expression of said CD27 (SEQ ID NO:10). In another embodiment of this method, the method includes wherein said prognosis of said patient is either longer survival or shorter survival. This method further includes administering to said patient a therapeutically effective amount of an adjuvant chemotherapy.

[0044] Patients and methods: The mRNA expression of 160 genes identified from microarray was analyzed in qRT-PCR assays of independent 337 snap-frozen NSCLC tumors to develop a predictive signature. A finical trial MR, 10 was included in the validation. Hazard ratio was used to select genes, and decision-trees were used to construct the predictive model. Protein expression was quantified with AQUA in 500 FFPE NSCLC samples.

[0045] Results: A 7-gene signature (of this invention) was identified from training cohort (n=83) with accurate patient stratification (P=0.0043) and was validated in independent patient cohorts (n=248, P<0.0001) in Kaplan-Meier analyses. In the predicted benefit group, there was a significantly better disease-specific survival in patients receiving adjuvant chemotherapy in both training (P=0.035) and validation (P=0.0049) sets. In the predicted non-benefit group, there was no survival benefit in patients receiving chemotherapy in either set. The protein expression of ZNF71 (SEQ ID NO:9) quantified with AQUA scores produced robust patient stratification in separate training (P=0.021) and validation (P=0.047) NSCLC cohorts. The protein expression of CD27 (SEQ ID NO:1 quantified with ELISA had a strong correlation with its mRNA expression in NSCLC tumors (Spearman coefficient=0.494, P<0.0088). Multiple signature genes had concordant DNA copy number variation, mRNA and protein expression in NSCLC progression.

[0046] Those persons skilled in the art will understand that this invention presents a predictive multi-gene assay and prognostic protein biomarkers clinically applicable for improving NSCLC treatment in patients, with important implications in lung cancer chemotherapy/immunotherapy.

[0047] In this invention, a combined analysis of genome-wide transcriptional profiles and qRT-PCR was utilized to develop a multi-gene assay both prognostic of NSCLC outcome and predictive of the benefits of chemotherapy. Patient cohorts from multiple hospitals in the US and JBR.10 data [14] were used to validate this multi-gene assay. Protein expression of the identified biomarkers was also evaluated in patient tissue samples and correlated with the mRNA expression and DNA copy number variation to substantiate their functional involvement and potential as therapeutic targets in chemotherapy and immunotherapy, in addition to companion tests.

[0048] Materials and Methods

[0049] Patient samples. Clinical characteristics of patient cohorts used in qRT-PCR assays are summarized in Table 1. All NSCLC patients were staged I, II, or IIIA at the time of diagnosis. Tumor tissues were collected in surgical resections and were snap-frozen at −80° C. until used for RNA extraction. Tumor cell content was above 50% for qRT-PCR assays. Those with missing AJCC staging information, missing histology, death within 30 days of resection or from other disease conditions were excluded from further analysis. A total of 122 NSCLC patient samples were obtained from Case Western Reserve University (CWRU) Comprehensive Cancer Center. Total RNA of good quality was extracted from 89 tumor specimens. Good quality RNA from 101 lung adenocarcinoma tumor specimens was obtained from University of Michigan (UM) Comprehensive Cancer Center, with detailed description of patients, tissue specimens and mRNA quality check provided in [17]. A total of 65 NSCLC tumor specimens from NorthShore University HealthSystem Kellogg Cancer Center and 49 specimens from West Virginia University Cancer Institute [Mary Babb Randolph Cancer Center (MBRCC)] generated good quality mRNA. The tissue collection in this study was approved by an Institutional Review Board (IRB) at each institution.

[0050] RNA extraction, and quality and concentration assessments. Total RNA was extracted from snap-frozen tumor tissues using a RNeasy mini kit according the manufacturer's protocol (Qiagen, USA), followed by elution in 30 μl of RNase-free water and storage at −80° C. The quality and integrity of the RNA, the 28S to 18S ratio, and a visual image of the 28S and 18S bands were evaluated on the 2100 Bioanalyzer (Agilent Technologies, CA). RNA assessed as having good quality from 304 tumor samples was included for further analysis. The RNA concentration of each sample was assessed using a Nanodrop-1000 Spectrophotometer (NanoDrop Tech, Germany).

[0051] Generation of complementary DNA (cDNA). The reverse transcriptase polymerase chain reaction was used to convert the high-quality single-stranded RNA samples to double-stranded cDNA, using an Applied Biosystems GeneAmp® PCR 9700 machine (Foster City, Calif.). For standardization across all samples, one microgram of RNA was used to generate cDNA.

[0052] Real-time quantitative RT-PCR low-density arrays. Real-time qRT-PCR assays of independent patient cohorts of NSCLC tumor samples were used to further select biomarkers to form a multi-gene assay from prognostic genes identified from microarray data in our previous studies [18-21]. The identified prognostic genes were initially validated with multiple independent NSCLC microarray data publically available [18-21]. Based on the validation results, 160 prognostic genes and three housekeeping genes were included in the qRT-PCR experiments. The three housekeeping genes were 18S, UBC, and POLR2A due to their confirmed constant mRNA expressions across samples [18].

[0053] Three hundred thirty seven (337) tumor samples were analyzed with good RNA quality using TaqMan microfluidic low-density array (LDA) plates on an ABI 7900HT Fast RT-PCR instrument (Applied Biosystems). Total RNA samples were analyzed on an Agilent 2100 Bioanalyzer RNA 6000 Nano LabChip. The report was generated by the SDS2.3 software (Applied Biosystems). In the report, the number of cycles required to reach threshold fluorescence (Ct) and ΔC_{T} for each sample relative to the control gene defines the expression pattern for a gene. The gene expression data were further analyzed using the 2^{-ΔΔC}^{_{T}} method [22].

[0054] Statistical and computational analysis. Prognostic biomarkers were evaluated with Cox proportional hazard model. Hazard ratio was used in the evaluation of prognostic performance of biomarkers. If a biomarker gives a hazard ratio greater than 1, it means that patient samples predicted as high risk are more likely to have a poor outcome. In the evaluation of genes in qRT-PCR assays, ΔC_{T} was used as a covariate in Cox model. If a gene as a hazard ratio greater than 1, it means that down-regulation of this gene is associated with a poor outcome and up-regulation of this gene is associated with a good outcome in NSCLC patients; otherwise, if a gene has a hazard ratio less than 1, it means that down-regulation of this gene is associated with a good outcome and up-regulation of this gene is associated with a poor outcome in NSCLC patients. During the evaluation, UBC (Hs00824723_m1) was chosen as the house keeping gene to normalize gene expression. The CWRU cohort was used as the training set, and seven genes were selected to form a prognostic classifier based on decision trees. These seven genes are ABCC4 (Hs00988717_m1) (SEQ ID NO:1), CCL19 (Hs00171149_m1) (SEQ ID NO:2), SLC39A8 (Hs00223357_m1) (SEQ ID NO:3), CD27 (Hs00154297_m1) (SEQ ID NO:4), FUT7 (Hs00237083_m1) (SEQ ID NO:5), ZNF71 (Hs00221893_m1) (SEQ ID NO:6), and DAG1 (Hs00189308_m1) (SEQ ID NO:7). The 7-gene prognostic method of this invention was validated with independent patient cohorts (UM, MBRCC, and NorthShore). In Kaplan-Meier analysis, log-rank tests or Wilcoxon tests were used to assess the difference in probability of survival of different prognostic groups. All the analyses were performed with packages in R or SAS unless otherwise specified.

[0055] Validation on clinical trial JBR.10. Data from JBR.10 was obtained from NCBI Gene Expression Omnibus with accession number GSE14814. A total of 133 non-small cell lung cancer samples were profiled for gene expression using Affymetrix 133A platform [14]. Patients were all in early stage (I or II). Patient samples assayed in the same batch with consecutive accession numbers ranging from GSM370913 to GSM371002 (n=90) were used in the validation of the 7-gene signature. Among these patient samples, those who died from other disease conditions were excluded from further analysis. ABCC4 (203196_at), CCL19 (210072_at), CD27 (206150_at), DAG1 (205417_s_at and 212128_s_at), FUT7 (210506_at and 217696_at), SLC39A8 (209266_s_at, 209267_s_at, 216504_s_at, and 219869_s_at), and ZNF444 (218707_at and 50376_at) were used in validating the qRT-PCR based multi-gene assay. For a gene with multiple probe sets, the one with the highest expression value (yielding the clearest signal) in each sample was chosen to represent the gene expression. ZNF71 was not available in the GSE14814 dataset. ZNF444 was chosen to replace ZNF71 to validate the qRT-PCR results, because both ZNF444 and ZNF71 are at locus NC 000019.10 in Chromosome 19 and belong to zinc finger protein family. To be compatible with the ΔCₜ values in qRT-PCR data, log₂ transformed microarray data was used in the analysis, and the expression values of UBC minus those of selected probes were used in the normalization of the microarray data.

[0056] Tissue Microarrays (TMA). Samples from 2 retrospective collections of lung cancer were examined in TMA format from Yale University Pathology Archives; Cohort A (YTMA 250 [n=298]) and Cohort B (YTMA 79 [n=202]). TMAs consisted of 0.6 mm cores in 1 (Cohort A) and 2 fold (Cohort B) redundancy. TMAs were prepared according to standard methods. Cohort A comprises 314 serially collected NSCLC who underwent surgical resection of their primary tumor between 2004 and 2011. Cohort B comprises of 202 serially collected NSCLC patients who underwent surgical resection of their primary tumor between 1988 and 2003. All tissue was used after approval from the Yale Human Investigation Committee protocol #9505008219, which approved the patient consent forms or in some cases waiver of consent. The actual number of samples analyzed for each study is lower, due to unavoidable loss of tissue or the absence or limited tumor cells in some spots as is commonly seen in TMA studies. NSCLC patients in stage I, II, and IIIA were included in the analysis. Those who died with no evidence of disease were excluded from further analysis.

[0057] Quantitative immunofluorescence. FFPE whole-tissue sections, tissue microarrays (TMAs) and cell pellets were processed at Yale Cancer Center/Pathology Tissue Microarray Facility.

[0058] FFPE whole-tissue sections, tissue microarrays (TMAs) and cell pellets were processed as follows: briefly, sections were baked for 30 minutes at 60 degrees Centigrade and underwent two twenty minute wash cysles in xylenes. Slides were rehydrated in two 1-minute washes in 100% ethanol followed by one washing 70% ethanol and finally rinsed in streaming tap water for 5 minutes. Antigen retrieval was performed in sodium citrate buffer pH.6, for 20 minutes at 97 degrees Centigrade in a PT module (LabVision). Endogenous peroxidases were blocked by 30-minute incubation in 2.5% hydrogen peroxide in methanol. Nonspecific antigens were blocked by a 30 minute incubation in 0.3% BSA in TBST. Slides were then incubated with the target primary antibody (ZNF71 Abcam; ab87250), as well as pan cytokeratin (AE1/AE3) overnight at 4 degrees Centigrade diluted at 1:100 to define the tumor compartment.

[0059] Primary antibodies were followed by incubation with Alexa 546-conjugated goat anti-mouse secondary antibody (Life Technologies) diluted 1:100 in rabbit EnVision reagent (Dako) for 1 hour. ZNF71 signal was amplified with Cy5-Tyramide (Perkin Elmer) for 10 minutes, and then nuclei were stained with 0.05 mg DAPI in BSA-tween for 10 minutes. Slides were mounted with ProlongGold (Life Technologies). Two TBS-T and one TBS wash was performed between each step after the primary antibody.

[0060] Immunofluorescence was quantified using automated quantitative analysis (AQUA) Fluorescent images of DAPI, Cy3 (Alexa 546-cytokeratin), and Cy5 (ZNF71) for each TMA spot were collected. Image analysis was carried out using the AQUAnalysis software (Navigate Biopharma Inc.), which generated an AQUA score for each compartment by dividing the sum of target pixel intensities by the area of the compartment in which the target is measured. AQUA scores were normalized to the exposure time and bit depth at which the images were captured, allowing scores collected at different exposure times to be directly comparable. Specimens with less than 5% tumor area per region of interest were not included in AQUA analysis for not being representative of the corresponding tumor specimen.

[0061] Enzyme-Linked Immunosorbent Assay (ELISA). A total of 38 NSCLC patient tissue samples were selected for ELISA assays, including 29 tumor resections of lung adenocarcinoma and squamous cell lung cancer and 9 matched adjacent normal lung tissue samples. The DuoSet ELISA Development Systems from R&D Systems (Minneapolis, Minn.; catalog number: DY382-05) were used for quantifying protein expression of T-Cell Activation Antigen CD27 (CD27)/Tumor Necrosis Factor Receptor Superfamily, Member 7 (TNFRSF7) in NSCLC patient tissue samples, according to manufacturer's protocol. The ELISA assay results were quantified using the Synergy H1 Hybrid Multi-Mode Microplate Readers from BioTek Instruments, Inc. (Winooski, Vt.). Samples that yielded a positive OD values were included for further analysis. Statistical analysis was done using a two-sample t-test assuming unequal variances. The concordance between CD27 mRNA and protein expression was evaluated with Spearman correlation coefficient.

[0062] Results:

[0063] The NSCLC prognostic biomarkers identified with hybrid feature selection models [18, 19] and molecular network approach [20, 21] in our previous studies were validated with multiple independent microarray datasets. Based on the validation results in microarray data, 160 genes were selected for assays using low-density microfluidic qRT-PCR arrays. Among 160 genes analyzed in the qRT-PCR assays, a 7-gene signature of this invention was identified from training cohort obtained from Case Western Reserve University (CWRU; n=83). Details of the decision tree based 7-gene prognostic and predictive method of this invention are provided in FIG. 4A. In the training cohort (CWRU), the 7-gene model stratified patients into two prognostic groups with significantly different disease-specific survival (P=0.0043; FIG. 1A). Moreover, in the 7-gene assay predicted chemotherapy benefit (high-risk) patient group, there was a significant prolonged disease-specific survival (P=0.035; FIG. 1B) in adjuvant chemotherapy treated patients (ACT) compared with the observation group (OBS) who did not receive any chemotherapy. Specifically, the 30 months survival rate was less than 0.4 in the high-risk patients in who did not receive chemotherapy (the OBS group), and the 30 months survival rate was 100% (5/5) in patients receiving adjuvant chemotherapy (the ACT group). In contrast, there was no survival benefit in receiving chemotherapy (P=0.31; FIG. 1C) in the 7-gene assay predicted non-benefit (low-risk) group. Consistent prognostic and predictive results were confirmed in the validation set (n=248), including NSCLC patients from another three hospitals (UM, MBRCC, and NorthShore) as well as a clinical trial JBR.10 [14] (FIGS. 1D, 1E, and 1F). In the validation set, the 7-gene signature generated significant prognostic stratification (P<0.0001; FIG. 1D). In the predicted benefit (high-risk) patient group, there was a significant prolonged disease-specific survival in the ACT group compared with the OBS group (P=0.0049; FIG. 1E). Specifically, the 5-year survival rate was 70.9% (39/55) in the high-risk patients who received adjuvant chemotherapy (the ACT group), whereas the 5-year survival rate was 45.8% (22/48) in high-risk patients who did not receive adjuvant chemotherapy (the OBS group). In contrast, in the predicted non-benefit (low-risk) group, there was no survival benefit in the ACT group compared with the OBS group (P=0.46, FIG. 1F). It is noteworthy that in the predicted non-benefit (low-risk) group, patients who received adjuvant chemotherapy (ACT) had a worse post-surgical survival in the long term compared with those who did not receive any chemotherapy (OBS) in both training and validation sets (FIG. 1C and FIG. 1F). These results further corroborate the 7-gene model prediction of non-benefit that patients would suffer from unnecessary cytotoxicity side-effects of chemotherapy instead of benefiting from it. Overall, these results demonstrate that the 7-gene assay is both prognostic of NSCLC clinical outcome and predictive of the benefits from chemotherapy. In FIGS. 1B, 1C 1E, and 1F the following abbreviations are used: ACT: Adjuvant chemotherapy group; OBS: observation group without chemotherapy. The validation set includes patient cohorts from MBRCC, UM, JBR.10, and Northshore. The 7-gene signature stratified patients into high-risk and low-risk groups in both training (FIG. 1A) and validation (FIG. 1D) sets. In the high-risk groups from training (FIG. 1 B) and validation (FIG. 1E) sets, there were significant survival benefits in patients receiving adjuvant chemotherapy (the ACT group) compared with those who did not receive any chemotherapy (the OBS group). In the low-risk groups from FIG. 1C and validation FIG. 1F sets, there were no significant survival benefits in patients receiving adjuvant chemotherapy (the ACT group) compared with those who did not receive any chemotherapy (the OBS group). P values were assessed with log-rank tests.

[0064] The chemoresponse prediction for specific therapeutic agents was examined in the identified 7 biomarkers. In particular, gene expression of ATP binding cassette subfamily C member 4 (ABCC4) was predictive of chemoresistance in patients receiving carboplatin, cisplatin, and Taxol, with under-expressed mRNA (higher ΔCₜ) value associated with significantly decreased hazard ratio of death from disease and tumor recurrence (see Table 2). In patients treated with carboplatin plus Taxol, using ΔCₜ value of ABCC4 in Cox model, the hazard ratio of death from disease of was 0.43 (95% CI: [0.208, 0.888], P=0.02) and the hazard ratio of recurrence was 0.343 (95% CI: [0.122, 0.968], P=0.04), both statistically significant. In patients treated with Taxol, the hazard ratio of death from disease of ABCC4 ΔCₜ value was 0.403 (95% CI: [0.194, 0.834], P=0.01, Cox model) and the hazard ratio of recurrence was 0.48 (95% CI: [0.253, 0.912], P=0.02, Cox model), both statistically significant. In patients treated with either carboplatin plus Taxol, carboplatin plus Taxotere, cisplatin plus Taxotere, or cisplatin plus Taxol, the hazard ratio of death from disease of ABCC4 ΔCₜ values was borderline significant (hazard ratio: 0.528 [0.271, 1.028], P=0.06, Cox model) and the hazard ratio of recurrence was significant at 0.545 (95% CI: [0.298, 0.998], P=0.049, Cox model; Table 2). The expression of fucosyltransferase 7 (FUT7) was predictive of chemosensitivity to carboplatin, with under-expressed mRNA (higher ΔCₜ value) associated with significantly increased hazard ratio of death from disease (hazard ratio: 1.605 [1.058, 2.435], P=0.026, Cox model; Table 2). The expression of zinc finger protein 71 (ZNF71)(SEQ ID NO:9) was also predictive of chemosensitivity in patients treated with either carboplatin plus Taxol, carboplatin plus Taxotere, cisplatin plus Taxotere, or cisplatin plus Taxol, with a significant hazard ratio of death from disease 1.986 (95% CI: [1.001, 3.938], P=0.049, Cox model; Table 2). Solute carrier family 39 member 8 (SLC39A8) was predictive of chemoresistance to Taxol, with a borderline significant hazard ratio of recurrence 0.584 (95% CI: [0.33, 1.03], P=0.06, Cox model; Table 2). The expression of SLC39A8 was also predictive of chemoresistance to Alimta (pemetrexed), with a borderline significant hazard ratio of recurrence 0.49 (95% CI: [0.219, 1.098], P=0.08, Cox model; Table 2).

[0065] The 7-gene NSCLC prognostic and predictive signature is involved in cell to cell signaling and interaction, inflammatory response, and cellular movement in Ingenuity Pathway Analysis (Qiagen, Redwood City, Calif.). Based on the molecular network of the 7 NSCLC biomarkers (FIG. 5A), the identified biomarkers have interactions with major inflammatory and cancer signaling hallmarks such as TNF, PI3K, NF-κB, and TGF-β. The top pathways involving the 7 signature genes and their interaction partners are nNOS signaling in skeletal muscle cells, CD27 signaling in lymphocytes, and agrin interactions at neuromuscular junction (FIG. 5B). The 7-gene signature identified in this study does not overlap with the NSCLC gene signatures reported in previous studies [13, 15-17, 23-25].

[0066] Protein expression of ZNF71 (SEQ ID NO:9) is prognostic of NSCLC outcome.

[0067] To substantiate the functional involvement of the identified 7 signature genes of the methods of this invention, protein expression of these biomarkers was evaluated with immunohistochemistry (IHC). Based on the IHC results, biomarkers with staining of good quality in FFPE NSCLC tumor tissues were further quantified with AQUA. Protein expression of ZNF71 (SEQ ID NO:9) was identified as prognostic of NSCLC outcome in two TMA cohorts (FIG. 5A). Based on the quantitative AQUA scores representing ZNF71 (SEQ ID NO:9) protein expression levels in tumor tissues, a cutoff point was defined for patient prognostic stratification in training cohort YTMA250 (n=145). Specifically, when logₑ-transformed ZNF71 (SEQ ID NO:9) AQUA scores were greater than or equal to 7.9, patients had significantly better disease-specific survival (P=0.021) than those with a lower ZNF71 (SEQ ID NO:9) protein expression level (FIG. 5B). This cutoff was further validated with significant patient stratification (P=0.047) in an independent cohort YTMA79 (n=46). Higher protein expression of ZNF71 (SEQ ID NO:9) is significantly associated with better patient survival, which is concordant with its mRNA results in multiple independent patient cohorts and its observed association with chemosensitivity in Taxol (Taxotere) plus platinum-based treatment in NSCLC patients (Table 2). These results indicate that ZNF71 (SEQ ID NO:9) is a prognostic protein biomarker and might be a potential therapeutic target of NSCLC. Furthermore, ZNF71 (SEQ ID NO:6) had a 7% (19/271) of loss of DNA copy number in a NSCLC patient cohort from Starczynowski et al [26] (n=271; FIG. 6). These results suggest the concordance in the loss of DNA copy number, down-regulated mRNA and protein expression of ZNF71 (SEQ ID NO:9) in lung cancer progression.

Concordant mRNA and Protein Under-Expression in NSCLC Progression:

[0068] The protein expression level of CD27 (SEQ ID NO:10) was quantified with ELISA assays in NSCLC tumor tissues (n=29) and normal adjacent lung tissues (n=9). Spearman correlation coefficient between mRNA and protein expression of CD27 (SEQ ID NO:10) is 0.494 (P<0.0088; FIG. 3a) in tumor tissues. CD27 (SEQ ID NO:10) had an average protein expression of 599.06 pg/mL in low-risk patients with a better disease-specific survival, and an average protein expression of 245.5 pg/mL in high-risk patients with a poorer disease-specific survival in ELISA assays. CD27 (SEQ ID NO:10) had significant under-expression in high-risk patients vs. low-risk patients at mRNA level with a fold-change of 0.17 (P<0.00001) and a fold-change of 0.41 (P<0.02) at protein level (FIG. 3b). CD27 (SEQ ID NO:10) had an average protein expression of 191 pg/mL in normal lung tissues. CD27 (SEQ ID NO:10) had significant protein over-expression in NSCLC tumor vs. normal tissues with a fold-change of 2.56 (P<0.025), while mRNA expression in tumor vs. normal tissues was not significantly different (FIG. 3b). The over-expressed CD27 (SEQ ID NO:10) protein in NSCLC tumors is concordant with an observed 4% (11/271) of gain or amplification of DNA copy number in the NSCLC patient cohort from Starczynowski et al [26] (n=271; FIG. 6). Overall, these results demonstrate that CD27 (SEQ ID NO:10) had concordant under-expression at both mRNA and protein levels in NSCLC patients with a poor outcome and a greater chance of tumor recurrence and metastasis. The overexpressed CD27 (SEQ ID NO:10) protein level in NSCLC tumor vs. normal lung tissues indicates that CD27 regulation in tumorigenesis and metastatic processes is different. Our results confirm the role of CD27 (SEQ ID NO:10) as a target in lung cancer immunotherapy [27, 28].

[0069] Lung cancer is the second most common cancer in both men and women, and remains the highest cancer-related mortality with a death rate higher than colon, prostate, and breast cancer combined. Currently, there is no clinically available multi-gene assay to prognosticate and predict the benefits of chemotherapy in NSCLC patients for improved personalized treatment. Immunotherapy is more effective and less toxic than chemotherapy in advanced lung cancers [5-8, 29, 30], and recent studies show promise of immunotherapy in early stage lung cancer patients [8]. Nevertheless, predictive biomarkers and therapeutic targets of immunotherapy are not well established.

[0070] There were abundant publically available microarray data generated in NSCLC patient tissues. Although microarray platforms are phasing out, the legacy data and biomarkers identified in microarray platforms are still useful in the RNA-seq era [9]. However, high-throughput platforms such as microarrays and RNA-seq are not suitable for routine clinical tests. Validation of biomarkers identified from high-throughput technologies with qRT-PCR emerges as the most promising experimental protocol for developing multi-gene assays for clinical applications.

[0071] NSCLC prognostic biomarkers were identified with hybrid feature selection models [18, 19, 31] and molecular network approach [20, 21] in our previous studies. The hybrid feature selection models [18, 19, 31] contain multiple layers of gene selection algorithms in the process of biomarker identification. This scheme takes advantage of different algorithms in different stages of gene shaving, in order to identify the gene signatures with the optimal performance. The molecular network approach [20, 21] constructs genome-scale co-expression networks in good-prognosis and poor-prognosis patient groups separately, and compares the network structures of these two patient groups to identify disease-specific network modules. Next, genes with concurrent co-expression with multiple major lung cancer signaling hallmarks were pinpointed from disease-specific network modules for further gene signature identification. This approach embedded biological relevance into biomarker identification. The signature genes identified with these sophisticated approaches were validated with multiple independent publically available microarray datasets. Genes with consistent expression patterns in multiple validation sets were included in qRT-PCR assays. The 7-gene signature of the methods of this invention identified in qRT-PCR assays was prognostic and predictive of chemoresponse in patient cohorts from multiple hospitals and JBR.10.

[0072] The identified 7 signature genes have interactions with major inflammatory and cancer signaling hallmarks including INF, PI3K, NF-κB, and TGF-β (FIG. 5A). Multiple signature genes are potential targets in cancer immunotherapy. Specifically, reduction of DAG1 may increase susceptibility of muscle fibers to necrosis [32]. A study shows that DAG-1 cells are resistant to TNF-α and IFNγ-induced apoptosis, with implications in bladder cancer progression and resistance to immunotherapy [33]. CD27 is part of TNF receptor family, and overexpression of CD27 induces NF-κB activation involving signaling transduction of TNF receptor-associated factors [34]. CD27 was also reported as a potential target of cancer immunotherapy [27, 28]. The synergy between PD-1 blockade and CD27 stimulation for CD8+ T-cell driven anti-tumor immunity was reported recently [35], indicating the therapeutic potential of CD27 in neoadjuvant PD-1 blockade in resectable lung cancer. The zinc finger protein ZNF71 is induced by TNF-α [37] and ZNF71 SNP was found to be associated with asthma in human serum [38]. CCL19 is regulated by multiple NF-κB and INF family transcription factors in human monocyte-derived dendritic cells [39]. ABCC4 is associated with multiple drug resistance in cancer [40] and smooth muscle cell proliferation [41], and interacts with PI3K in cancer prognosis and drug resistance [42]. Our results on ABCC4 in Table 2 are consistent with its functional role and reported drug resistance. FUT7 interacts with TNF-α in human bronchial mucosa [43] and its induction at sites of tumor cell arrest is involved in metastasis [44]. NF-κB was reported to regulate expression of the zinc transporter SLC39A8 [45]. Indirect interactions between TGF-β and SLC39A8 are involved in tumorigenesis [46] and fibrogenic response [47].

[0073] The 7-gene signature identified in the methods of this invention does not overlap with the NSCLC gene signatures reported in recent studies [15, 16, 23-25]. However, several biomarker genes identified in this study belong to the same families or functional categories as the biomarkers identified in [14-16]. In particular, FUT7 from the current study and FUT3 from Kratz et al [16] are both fucosyltransferase and involved in metabolism. In the 12-gene prognostic and predictive signature from Tang et al [15], two genes belong to the same family or share similar functions as the 7-gene signature. Specifically, SLC35A5 from Tang et al [15] and SLC39A8 from this study both belong to solute carrier superfamily, and ATPase Phospholipid Transporting 8A1 (ATP8A1) from Tang et al [15] and ATP Binding Cassette Subfamily C Member 4 (ABCC4) from this study are both involved in energy metabolism. The 15-gene prognostic and predictive gene signature of JBR.10 [14] also contains two genes that share similar functions as the 7-gene signature. ATPase Na+/K+ Transporting Subunit Beta 1 (ATP1B1) from Zhu et al [14] and ABCC4 from this study are again involved in energy metabolism, and ZNF236 from Zhu et al [14] and ZNF71 identified in this study both belong to zinc finger protein family. Overall, the 7-gene signature presented in this invention and two previous gene signatures from Zhu et al [14] and Tang et al [15] are all prognostic of NSCLC outcome and predictive of the benefits of chemotherapy. These three gene signatures all contain a biomarker related to ATP activities and energy metabolism. Other shared gene families between the 7-gene signature of this invention and these two signatures include zinc finger protein and solute carrier superfamily. The 7-gene signature and the practical prognostic gene assay for non-squamous NSCLC by Kratz et al [16] both contain biomarkers from fucosyltransferase family. These common gene families shared by the NSCLC gene signatures with promise for clinical utility might be functionally involved in tumor metastasis with implications in lung cancer therapy.

[0074] The protein expression of the identified 7 signature genes was also validated in this study. In particular, ZNF71 protein expression quantified with AQUA was a prognostic biomarker in two NSCLC patient cohorts (n=191). Higher mRNA and protein expression of ZNF71 is both associated with good prognosis, and ZNF71 mRNA is predictive of chemosensitivity in Taxol (paclitaxel) plus platinum-based treatment in NSCLC patients, and docetaxel plus platinum-based treatment in NSCLC patients. These results demonstrate that ZNF71 mRNA and protein expression can both be used in prognostication of NSCLC in clinical applications and ZNF71 may be a therapeutic target. CD27 had highly correlated mRNA and protein expression, with significant under-expression in poor prognostic (high-risk) NSCLC patients. CD27 mRNA and protein expression could potentially be used as a biomarker and target in lung cancer immunotherapy. Protein expression of CCL19 was also confirmed with ELISA in NSCLC tumor and adjacent normal tissues. CCL19 protein was under-expressed in NSCLC tumor tissues compared with normal lung tissues, with no statistically significant difference (results not shown). CCL19 also had lower protein expression in poor-prognosis (high-risk) NSCLC patients compared with good-prognosis (low-risk) patients, with no statistically significant difference (results not shown). The trend of CCL19 protein expression was qualitatively concordant with its mRNA expression that higher expression of CCL19 is associated with good prognostic outcome of NSCLC. CCL19 had a 12.5% (34/271) of a loss of DNA copy number in the NSCLC patient cohort from Starczynowski et al [26] (n=271; FIG. 6), which suggests a loss of DNA copy number and down-regulated mRNA and protein expression of CCL19 in NSCLC progression. In our previous integrated DNA copy number and gene expression regulatory network analysis of NSCLC metastasis, CCL19 is a driver gene and CD27 expression is modulated by CCL19 in squamous cell lung cancer patients with good prognosis [48]. Together with the molecular network reported in the literature (and see FIG. 5A), while not being bound to any particular theory, the interaction between CCL19 and CD27 could be through PI3K and NF-κB complexes. In addition, FUT7 and DAG1 had concordant loss or deletion of DNA copy number (FIG. 6) and down-regulated gene expression in NSCLC progression (Table 2 and FIG. 4A).

[0075] This invention provides a method of measuring the expression gene expression levels comprising determining the level of expression of the following multi-gene set consisting of ABCC4 (SEQ ID NO:1), CCL19 (SEQ ID NO:2), SLC39A8 (SEQ ID NO:3), CD27 (SEQ ID NO:4), FUT7 (SEQ ID NO:5), ZNF71 (SEQ ID NO:6), and DAG1 (SEQ ID NO:7). This method using this particular seven gene combination has never before been known to aid in the benefit of survival rates of patients afflicted with non-small cell lung cancer.

[0076] The method comprises the following steps: (1) extraction of total RNA from a tumor of non-small cell lung cancer after the surgical resection, (2) generation of complementary DNA (cDNA) of the extracted total RNA from a patient tumor, (3) quantification of mRNA expression of 7 genes: ABCC4 (SEQ ID NO:1), CCL19 (SEQ ID NO:2), SLC39A8 (SEQ ID NO:3) CD27 (SEQ ID NO:4), FUT7 (SEQ ID NO:5), ZNF71 (SEQ ID NO:6), and DAG1 (SEQ ID NO:7), (4) normalization of the quantification of the 7 genes with the quantification of a control gene UBC (SEQ ID NO:8), and (5) utilization of the normalized 7 gene mRNA expression quantification to predict whether a patient will benefit from receiving adjuvant chemotherapy or not. This method further comprises the step of predicting clinical benefit (i.e. prolonged disease-specific survival) of receiving adjuvant chemotherapy, including therapies selected from cisplatin and Taxol (paclitaxel), cisplatin and Taxotere (docetaxel), carboplatin, carboplatin and Taxol (paclitaxel), carboplatin and Taxotere (docetaxel), Taxol (paclitaxel), and Alimta (pemetrexed).

[0077] A preferred embodiment of this method includes use of a composition of only the following three: ABCC4 (SEQ ID NO:1), CCL19 (SEQ ID NO:2), and SLC39A8 (SEQ ID NO:3), within the 7-gene assays from this method, which also predicts the clinical benefit of receiving adjuvant chemotherapy. In another preferred embodiment of this method, the method includes use of a composition of only the following four genes: CD27 (SEQ ID NO:4), FUT7 (SEQ ID NO:5), ZNF71 (SEQ ID NO:6) and DAG1 (SEQ ID NO:7), within the 7-gene assays from the method, which also predicts the clinical benefit of receiving adjuvant chemotherapy.

[0078] Another method of this invention provides for the high expression of ABCC4 (SEQ ID NO:1) predicted chemoresistance to carboplatin and Taxol (paclitaxel), Taxol (paclitaxel), carboplatin and Taxotere (docetaxel), cisplatin and Taxotere (docetaxel), and cisplatin and Taxol (paclitaxel).

[0079] Another method of this invention provides for the high expression of FUT7 (SEQ ID NO:5) predicted chemosensitivity to carboplatin.

[0080] Another method of this invention provides for the high expression of ZNF71 (SEQ ID NO:6) predicted chemosentivity to carboplatin and Taxol (paclitaxel), carboplatin and Taxotere (docetaxel), cisplatin and Taxotere (docetaxol), and cisplatin and Taxol (paclitaxel).

[0081] Another method of this invention provides for the high expression of SLC39A8 (SEQ ID NO:3) predicted chemoresistance to Taxol (paclitaxel), and Alimta (pemetrexed).

[0082] Another method of this invention provides for the protein expression of ZNF71 (SEQ ID NO:9) quantified with automated quantitative analysis (AQUA) correlated with its mRNA expression in patient tumors. The protein expression of ZNF71 (SEQ ID NO:9) can independently classify patients into prognosis (longer survival) group or poor prognosis (shorter survival) group.

[0083] Another method of this invention provides for the protein expression of CD27 (SEQ ID NO:10) quantified with ELISA had a significant correlation with its mRNA in patient tumors and adjacent normal lung tissues, and could be an independent protein biomarker for patient prognosis and treatment selection.

TABLE 1
Clinical information of non-small cell lung cancer patient cohorts
collected for the qRT-PCR analysis.

| | | CWRU | MBRCC | UM | NorthShore | |
|---|---|---|---|---|---|---|
| | | (n = 89) | (n = 49) | (n = 101) | (n = 65) | |
| Age | Mean (Std error) | 70.11 (0.94) | 66.70 (1.25) | 67.04 (0.96) | 69.64 (1.02) | |
| | <60 | 15 (15.15%) | 7 (14.29%) | 28 (27.72%) | 7 (10.77%) | |
| | ≥60 | 84 (84.85%) | 39 (79.59%) | 73 (72.28%) | 48 (73.85%) | |
| | Missing | | 3 (6.12%) | | 10 (15.38%) | |
| Sex | F | 52 (52.53%) | 23 (46.94%) | 53 (52.48%) | 34 (52.31%) | |
| | M | 47 (47.47%) | 26 (53.06%) | 48 (47.52%) | 21 (32.31%) | |
| | Missing | | | | 10 (15.38%) | |
| Smoking | Current | 43 (43.43%) | 1 (2.04%) | | Yes | 60 |
| | Former | 40 (40.40%) | 3 (6.12%) | | | (92.31%) |
| | Never | 8 (8.08%) | | | No | 5 |
| | Passive | 1 (1.01%) | | | | (7.69%) |

| | | | | | |
|---|---|---|---|---|---|
| | Other | 1 (1.01%) | | | |
| | Missing | 6 (6.06%) | 45 (91.48%) | | |
| AJCC stage | I | 46 (46.46%) | 27 (55.10%) | 59 (58.42%) | 46 (70.77%) |
| | II | 46 (46.46%) | 16 (32.65%) | 16 (15.84%) | 15 (23.08%) |
| | III | 6 (6.06%) | 6 (12.25%) | 26 (25.74%) | 4 (6.15%) |
| | Missing | 1 (1.01%) | | | |
| Chemotherapy | Yes | 29 (29.29%) | 27 (55.10%) | 24 (23.76%) | 28 (40.03%) |
| | No | 52 (52.53%) | 20 (40.82%) | 77 (76.24%) | 36 (55.38%) |
| | Missing | 13 (13.13%) | 2 (4.08%) | | 1 (1.54%) |
| Histology | Adenocarcinoma | 65 (65.66%) | 27 (55.10%) | 101 (100%) | 43 (66.15%) |
| | Squamous | 27 (27.27%) | 14 (28.57%) | | 11 (16.92%) |
| | Other | 7 (7.07%) | 8 (16.33%) | | 6 (9.23%) |
| | Missing | 5 (5.05%) | | | 5 (7.69%) |
| Differentiation | Well | 5 (5.05%) | | 28 (27.72%) | 20 (30.77%) |
| | Moderate | 44 (44.44%) | | | 4 (6.15%) |
| | Moderate to Poorly | 4 (4.04%) | | 39 (38.61%) | 22 (33.85%) |
| | Poorly | 35 (35.35%) | | 34 (33.66%) | 17 (26.15%) |
| | Missing | 11 (11.11%) | | | 2 (3.08%) |
| Tumor Grade | 1 | 5 (5.05%) | 3 (6.12%) | | 20 (30.77%) |
| | 2 | 44 (44.44%) | 18 (36.73%) | | 19 (29.23%) |
| | 3 | 36 (36.36%) | 22 (4.90%) | | 21 (32.31%) |
| | Other | 3 (3.03%) | | | |
| | Missing | 11 (11.11%) | 6 (12.25%) | | 5 (7.69%) |

TABLE 2
Predictive biomarkers of chemoresponse in non-small cell lung cancer.
Hazard ratios were computed with Cox proportional hazard model
using ΔCₜ values in qRT-PCR assays.

| | | Hazard ratio | | |
|---|---|---|---|---|
| | | of death | Hazard ratio | |
| | | from | of recurrence | |
| | Chemotherapeutic | disease with | with 95% | Chemosensitive/ |
| Genes | agents | 95% CI | CI | resistant |
| ABCC4 | Carboplatin + | 0.43 [0.208, | 0.343 | Chemoresistant |
| SEQ ID | Taxol | 0.888]* | [0.122, | |
| NO: 1 | | | 0.968]* | |
| | Taxol | 0.403 | 0.48 | Chemoresistant |
| | | [0.194, | [0.253, | |
| | | 0.834]* | 0.912]* | |
| | Carboplatin + | 0.528 | 0.545 | Chemoresistant |
| | Taxol | [0.271, | [0.298, | |
| | Carboplatin + | 1.028]^{#} | 0.998]* | |
| | Taxotere | | | |
| | Cisplatin + | | | |
| | Taxotere | | | |
| | Cisplatin + Taxol | | | |
| FUT7 | Carboplatin | 1.605 | — | Chemosensitive |
| SEQ ID | | [1.058, | | |
| NO: 5 | | 2.435]* | | |
| ZNF71 | Carboplatin + | 1.986 | | Chemosensitive |
| SEQ ID | Taxol | [1.001, | | |
| NO: 6 | Carboplatin + | 3.938]* | | |
| | Taxotere | | | |
| | Cisplatin + | | | |
| | Taxotere | | | |
| | Cisplatin + Taxol | | | |
| SLC39A8 | Taxol | — | 0.584 [0.33, | Chemoresistant |
| SEQ ID | | | 1.03]^{#} | |
| NO: 3 | Alimta | — | 0.49 [0.219, | Chemoresistant |
| | | | 1.098]^{#} | |

*Hazard ratio significant at p < 0.05
^{#}Hazard ratio borderline significant at p < 0.08

[0084] This invention presents a method using a 7-gene predictive assay based on qRT-PCR to improve NSCLC treatment in clinics. This method using a 7-gene assay provides accurate prognostication and prediction of the clinical benefits of chemotherapy in multiple patient cohorts from the US hospitals and the clinical trial JBR.10. The 7-gene assay is enriched in inflammatory response. The protein expression of ZNF71 (SEQ ID NO:9) is prognostic of NSCLC outcome in two independent patient cohorts, which is concordant with its mRNA expression. These results demonstrate that ZNF71 (SEQ ID NO:9) is a prognostic protein biomarker and a useful therapeutic target of NSCLC. The protein expression of CD27 (SEQ ID NO:10) was strongly correlated with its mRNA expression in NSCLC tumor tissues, and serves as a biomarker and target of immunotherapy in lung cancer. Multiple signature genes had concordant DNA copy number variation, mRNA and protein expression in NSCLC progression. The results presented in this invention are important for precision therapy in NSCLC patients, and further provides implications in developing new therapeutic strategies to combat this deadly disease.

[0085] This invention provides a method of treating a patient using a 7-gene assay that is predictive of clinical benefits of a patient receiving Alimta (pemetrexed for injection) and commercially available from Eli Lilly and Company, Indianapolis, Ind., USA. Alimta® product is a chemotherapy for the treatment of advanced nonsquamous non-small cell lung cancer (NSCLC). Alimta® is a registered trademark owned or licensed by Eli Lilly and Company.

[0086] This invention provides for the protein expression of ZNF71 (SEQ ID NO:9) that is a prognostic marker of non-small cell lung cancer. This invention provides a method of using the expression of ZNF71(SEQ ID NO:9) quantified with AQUA (i.e. Automated Quantitative Analysis ((AQUA)) of In Situ Protein Expression, to identify which patients having non-small cell lung cancer are likely to have good prognosis, and which patients are likely to be poor prognosis.

[0087] This invention provides an aid to help physicians determine which non-small cell lung cancer patients, who were initially treated with surgery, will benefit from chemotherapy or immunotherapy. The seven gene assay of the methods of this invention is an aid to predict which patients would benefit from chemotherapty and had significantly prolonged survival time compared to those patients who did not receive any chemotherapy, and which patients would not benefit from chemotherapy and whose long-term post surgical survival time was shorter compared to patients who also had surgery but did not receive any chemotherapy.

[0088] This invention provides a method for treating a patient having NSCLC comprising identifying two genes, CD27 (SEQ ID NO:4) and ZNF71 (SEQ ID NO:6), as useful in predicting patient outcomes and developing therapeutic targets in non-small cell lung cancer treatment.

[0089] It will be understood by those persons skilled in the art that this invention provides a multi-gene combination assay that provides guidance on the clinical benefits of providing chemotherapy to an individual having non-small cell lung cancer. This invention provides a method for providing precision medicine for lung cancer patients and provides therapeutic targets in both chemotherapy and immunotherapy.

[0090] This invention provides a method for improving personalized treatment of individuals having non-small cell lung cancer. Specifically, this invention provides a RT-PCR based method using a 7 gene assay for providing clinical benefits of chemotherapy to a patient having non-small cell lung cancer. This invention provides a prognostic protein biomarker ZNF71(SEQ ID NO:9) using AQUA technique. This invention provides a prognostic mRNA and protein biomarker CD27 (SEQ ID NO:10) with use in immunotherapy. This invention aids patients having non-small cell lung cancer who may benefit from chemotherapy. The protein biomarkers of this invention are new therapeutic targets in chemotherapy and immunotherapy.

### REFERENCES

[0091] 1. Spira, A. and D. S. Ettinger, Multidisciplinary management of lung cancer. N. Engl. J. Med, 2004. 350(4): p. 379-392.
[0092] 2. Goodgame, B., et al., Risk of recurrence of resected stage I non-small cell lung cancer in elderly patients as compared with younger patients. J. Thorac. Oncol, 2009. 4(11): p. 1370-1374.
[0093] 3. Crino, L., et al., Early stage and locally advanced (non-metastatic) non-small-cell lung cancer: ESMO Clinical Practice Guidelines for diagnosis, treatment and follow-up. Ann. Oncol, 2010. 21 Suppl 5: p. v103-v115.
[0094] 4. Byron, E. and M. Pinder-Schenck, Systemic and targeted therapies for early-stage lung cancer. Cancer Control, 2014. 21(1): p. 21-31.
[0095] 5. Aguiar, P. N., Jr., et al., PD-L1 expression as a predictive biomarker in advanced non-small-cell lung cancer: updated survival data. Immunotherapy, 2017. 9(6): p. 499-506.
[0096] 6. CM, J. S., et al., Immunotherapeutic strategies in non-small-cell lung cancer: the present and the future. Immunotherapy, 2017. 9(6): p. 507-520.
[0097] 7. Kaufman, H. L., Rational Combination Immunotherapy: Understand the Biology. Cancer Immunol Res, 2017. 5(5): p. 355-356.
[0098] 8. Lavin, Y., et al., Innate Immune Landscape in Early Lung Adenocarcinoma by Paired Single-Cell Analyses. Cell, 2017. 169(4): p. 750-765.e17.
[0099] 9. Su, Z., et al., An investigation of biomarkers derived from legacy microarray data for their utility in the RNA-seq era. Genome Biol, 2014. 15(12): p. 523.
[0100] 10. Hood, L., et al., Systems biology and new technologies enable predictive and preventative medicine. Science, 2004. 306(5696): p. 640-643.
[0101] 11. Votavova, H., et al., Optimized protocol for gene expression analysis in formalin-fixed, paraffin-embedded tissue using real-time quantitative polymerase chain reaction. Diagn. Mol. Pathol, 2009. 18(3): p. 176-182.
[0102] 12. Bosotti, R., et al., Cross platform microarray analysis for robust identification of differentially expressed genes. BMC. Bioinformatics, 2007. 8 Suppl 1: p. S5.
[0103] 13. Shedden, K., et al., Gene expression-based survival prediction in lung adenocarcinoma: a multi-site, blinded validation study. Nat. Med, 2008. 14(8): p. 822-827.
[0104] 14. Zhu, C. Q., et al., Prognostic and predictive gene signature for adjuvant chemotherapy in resected non-small-cell lung cancer. J Clin Oncol, 2010. 28(29): p. 4417-24.
[0105] 15. Tang, H., et al., A 12-gene set predicts survival benefits from adjuvant chemotherapy in non-small cell lung cancer patients. Clin Cancer Res, 2013. 19(6): p. 1577-86.
[0106] 16. Kratz, J. R., et al., A practical molecular assay to predict survival in resected non-squamous, non-small-cell lung cancer: development and international validation studies. Lancet, 2012. 379(9818): p. 823-832.
[0107] 17. Chen, G., et al., Development and validation of a quantitative real-time polymerase chain reaction classifier for lung cancer prognosis. J Thorac Oncol, 2011. 6(9): p. 1481-7.
[0108] 18. Guo, N. L., et al., Confirmation of gene expression-based prediction of survival in non-small cell lung cancer. Clin Cancer Res, 2008. 14(24): p. 8213-8220.
[0109] 19. Wan, Y. W., et al., Hybrid models identified a 12-gene signature for lung cancer prognosis and chemoresponse prediction. PLoS ONE, 2010. 5(8).
[0110] 20. Guo, N. L., et al., A novel network model identified a 13-gene lung cancer prognostic signature. Int. J. Comput. Biol. Drug Des, 2011. 4(1): p. 19-39.
[0111] 21. Wan, Y. W., D. G. Beer, and N. L. Guo, Signaling pathway-based identification of extensive prognostic gene signatures for lung adenocarcinoma. Lung Cancer, 2012. 76(1): p. 98-105.
[0112] 22. Livak, K. J. and T. D. Schmittgen, Analysis of relative gene expression data using real-time quantitative PCR and the 2(-Delta Delta C(T)) Method. Methods, 2001. 25(4): p. 402-408.
[0113] 23. Lau, S. K., et al., Three-gene prognostic classifier for early-stage non small-cell lung cancer. J Clin Oncol, 2007. 25(35): p. 5562-9.
[0114] 24. Navab, R., et al., Prognostic gene-expression signature of carcinoma-associated fibroblasts in non-small cell lung cancer. Proc Natl Acad Sci USA, 2011. 108(17): p. 7160-5.
[0115] 25. Chen, H. Y., et al., A five-gene signature and clinical outcome in non-small-cell lung cancer. N. Engl. J. Med, 2007. 356(1): p. 11-20.
[0116] 26. Starczynowski, D. T., et al., TRAF6 is an amplified oncogene bridging the RAS and NF-kappaB pathways in human lung cancer. J. Clin. Invest, 2011. 121(10): p. 4095-4105.
[0117] 27. Buchan, S. L., A. Rogel, and A. Al-Shamkhani, The immunobiology of CD27 and OX40 and their potential as targets for cancer immunotherapy. Blood, 2017.
[0118] 28. Turaj, A. H., et al., Antibody Tumor Targeting Is Enhanced by CD27 Agonists through Myeloid Recruitment. Cancer Cell, 2017.
[0119] 29. Bang, A., et al., Multicenter Evaluation of the Tolerability of Combined Treatment With PD-1 and CTLA-4 Immune Checkpoint Inhibitors and Palliative Radiation Therapy. Int J Radiat Oncol Biol Phys, 2017. 98(2): p. 344-351.
[0120] 30. Lazzari, C., et al., SECOND-LINE THERAPY OF SQUAMOUS NON-SMALL CELL LUNG CANCER: AN EVOLVING LANDSCAPE. Expert Rev Respir Med, 2017.
[0121] 31. Guo, L., et al., Constructing molecular classifiers for the accurate prognosis of lung adenocarcinoma. Clin. Cancer Res, 2006. 12(11): p. 3344-3354.
[0122] 32. Ibraghimov-Beskrovnaya, O., et al., Primary structure of dystrophin-associated glycoproteins linking dystrophin to the extracellular matrix. Nature, 1992. 355(6362): p. 696-702.
[0123] 33. Champelovier, P., et al., Dag-1 carcinoma cell in studying the mechanisms of progression and therapeutic resistance in bladder cancer. Eur Urol, 2001. 39(3): p. 343-8.
[0124] 34. Yamamoto, H., T. Kishimoto, and S. Minamoto, NF-kappaB activation in CD27 signaling: involvement of TNF receptor-associated factors in its signaling and identification of functional region of CD27. J Immunol, 1998. 161(9): p. 4753-9.
[0125] 35. Buchan, S. L., et al., PD-1 Blockade and CD27 Stimulation Activate Distinct Transcriptional Programs That Synergize for CD8(+) T-Cell-Driven Antitumor Immunity. Clin Cancer Res, 2018.
[0126] 36. Forde, P. M., et al., Neoadjuvant PD-1 Blockade in Resectable Lung Cancer. N Engl J Med, 2018.
[0127] 37. Mataki, C., et al., A novel zinc finger protein mRNA in human umbilical vein endothelial cells is profoundly induced by tumor necrosis factor alpha. J Atheroscler Thromb, 2000. 7(2): p. 97-103.
[0128] 38. Kim, J. H., et al., A genome-wide association study of total serum and mite-specific IgEs in asthma patients. PLoS One, 2013. 8(8): p. e71958.
[0129] 39. Pietila, T. E., et al., Multiple NF-kappaB and IFN regulatory factor family transcription factors regulate CCL19 gene expression in human monocyte-derived dendritic cells. J Immunol, 2007. 178(1): p. 253-61.
[0130] 40. Kochel, T. J. and A. M. Fulton, Multiple drug resistance-associated protein 4 (MRP4), prostaglandin transporter (PGT), and 15-hydroxyprostaglandin dehydrogenase (15-PGDH) as determinants of PGE2 levels in cancer. Prostaglandins Other Lipid Mediat, 2015. 116-117: p. 99-103.
[0131] 41. Sassi, Y., et al., Multidrug resistance-associated protein 4 regulates cAMP-dependent signaling pathways and controls human and rat SMC proliferation. J Clin Invest, 2008. 118(8): p. 2747-57.
[0132] 42. Wen, J., et al., The Pharmacological and Physiological Role of Multidrug-Resistant Protein 4. J Pharmacol Exp Ther, 2015. 354(3): p. 358-75.
[0133] 43. Delmotte, P., et al., Tumor necrosis factor alpha increases the expression of glycosyltransferases and sulfotransferases responsible for the biosynthesis of sialylated and/or sulfated Lewis x epitopes in the human bronchial mucosa. J Biol Chem, 2002. 277(1): p. 424-31.
[0134] 44. Laubli, H., et al., L-selectin facilitation of metastasis involves temporal induction of Fut7-dependent ligands at sites of tumor cell arrest. Cancer Res, 2006. 66(3): p. 1536-42.
[0135] 45. Liu, M. J., et al., ZIP8 regulates host defense through zinc-mediated inhibition of NF-kappaB. Cell Rep, 2013. 3(2): p. 386-400.
[0136] 46. Chang, X., et al., Ligand-independent regulation of transforming growth factor beta1 expression and cell cycle progression by the aryl hydrocarbon receptor. Mol Cell Biol, 2007. 27(17): p. 6127-39.
[0137] 47. Fang, F., et al., Early growth response 3 (Egr-3) is induced by transforming growth factor-beta and regulates fibrogenic responses. Am J Pathol, 2013. 183(4): p. 1197-1208.
[0138] 48. Iranmanesh, S. M. and N. L. Guo, Integrated DNA Copy Number and Gene Expression Regulatory Network Analysis of Non-small Cell Lung Cancer Metastasis. Cancer Inform, 2014. 13(Suppl 5): p. 13-23.

[0139] It will be appreciated by those persons skilled in the art that changes could be madeto embodiments of the present invention described herein without departing from the broad inventive concept thereof. It is understood, therefore, that this invention is not limited by any particular embodiments disclosed, but is intended to cover the modifications that are within the spirit and scope of the invention, as defined by the appended claims.

### SEQUENCE LISTING

[0140] A SEQUENCE LISTING in computer-readable form (.txt file) accompanies this application having SEQ ID NO:1 through SEQ ID NO:10. The computer-readable form (.txt file) of the SEQUENCE LISTING is incorporated by reference into this application. The SEQUENCE LISTING in computer-readable form (.txt file) is electronically submitted along with the electronic submission of this application.

The application's sequence listing, which the Patent Office published only in electronic form, follows.

SEQUENCE LISTING (10 sequences)

SEQ ID NO: 1 - DNA, 281618 bp, Homo sapiens
acaggctccagccgagcggacaggcgtggcggccggagccccagcatccctgcttgaggtccaggagcggagcccgcggccaccgccgcctgatcagcgcgaccccggcccgcgcccgccccgcccggcaagatgctgcccgtgtaccaggaggtgaagcccaacccgctgcaggacgcgaacctctgctcacgcgtgttcttctggtgagtgtccccgcccgaaacaggtcaccctgcagccgctggcgccgcggacgcactctcccggggccgcgcccgatgctgcccaagccctctgcggctgggggcgaggggagcgctttcctacgccacgcggtccacgccggggctttctgctgcgggtggcgccgcccccacgccggccgcgtggtccctgcctgcgccccggggcgcggcgcagggggacgcggggacgcggggccagtggctttgctactggaggccctgcgggcccttagggctcgggggaggaggagcaggaggtggggaggcggggaacccaggctgccgaaagggggagtctcttgcccagcgggagaagcgactgcaccccttacacgcccacccttcgctggctcccgcctcctgctctgggactcgcagtctcctgaactcaaacgcaccttttcctttctttttaagtaagcagcttacgaacagtttcctttatctgatctcagccaaagcctaattagtgtcctggacctatgccatctcccagtagtgtccccaccccttccgatattccttacgagacagctcgatccaactccacgtcccgttgtacctctctgtgtcccggtgtctctgtatcttttgtctcagtgaccagggctctccttttgcctctttgtgggaatctcactgtgtgtccatgtgggtcgtggtacctagttatggcaagtttcatgtgggtaaaataacactattattatttttcatttatgaatggggaccctgttcttgaacaagattttccaggatttgcttttaactgggacatgcaccgccacgactggagtctgtctttgaccagcttctttcccctgtttccaatactttcacttccacgtaggaggacagctcggaggtggggtccctggaatcgctaaccttcagagaggtgatccatggtcttgatgcaggtggttcctaccaggagttctaccttcttaaaaccaccccagggctcctgagctgggagggcccacagccctacccattttgtgcaaggaaacaaacggagaaagactcgggtgacagtagtaactaaaatttccatcttggcctggcgcggtggctcacgcctgtatccctgcactttgggaggcagaggtgggtggatcacgaggtcaggagttcgagaccagcctggctgacatggtgaaaccccgtctctactaaaaatacaaaaattagccgggtgtggtggagcacgcctgtaatcccagctactcaggaggctgaggcaggggaattgcttgaacccagtaggcggaggttgcagtgagctgagatcgccccactgtactccagcctgggtgacagagtgagactccgtcttgggggagtggcgggtgtgtgtgggggaattccgtctgctaactacataagcctgaacctttgaagggcttcaatctcacttggatgattattagatcttctgtttcttgacctctgccgcctcatctttcccacatgttgatattgccttttattatgggacaacctagggtgggggtctccaattttttgggttccctgggccacactggaagaattgtcttgggccatacataaaatacactaacactaatcatacactaacactaatgatagctgatgagctaaaaaaaaatcgcaaaaaaaaatctgatgttttaagaaagcttacgaatttggcagcccatgggcctcaggttggacaagcttgacctaggggattccaagaggatgagtcgcttactcttgtttcgattgtggtacactcagtgggtgtaggaacttctcttggttgtttggcggcctttctcttaaggagaggggcacgtggaggaggaaggaatatgggtgtggtttctgcaaataataacttgaggtagacaaatggtctcctcaacttcaggcagggcaaggaactttttttttttttttttgagacaggatcttgctttgtgcaagctgtgacccaggctggagggcagtgacacattcatagcttgctgcagcctccaactcctgggccgaagcaatcctcctgcctcagcctcccgagtagctggggctccaggtgtgtgtcaccatgcccggataataaaaaaaaattttttttgtagagatagggctctctatgttgttgctcaggctggtcttgaactcctgggctcaagtgttcctcccgcttcggccacccaaagtctgggattacagatgtgactcctgcctccttatatttttctccccctgcattttcaaaatgtaggtggcagggaaataggaagtgatgcgctcccattgatgacttgagtaggtgttcatttccggtttccctgatggaagggaaggagctagtagacctctgttttactccgaggacacttaagctgagagtggttaagttgcctggactcacacaacaatcaagtgtcagagcaggctccaaagctgggcagactggctccccagcctctttggagctgctgtactgagctgcttccagttcaggtgctgtcggaaatgcatggagaaggcgctccctgttctggaaggctagagtttctcaagggaaattcttaaagtacctgcagttggagatgatgcatgtgtaacaactattagtgtgctttagggcagctgttctcaaagcatagcactcagagcagcagcatcggcatcacttgggagattctaagagatgcagattctccagcatccactctggactgattcagtaaaactggaaacactgggtgtgtgggtgggggtggtgaggtttcaagtgctccaggtgatcctgatttgaggcgcttactgcttccagctactcctttcattggagtattattacagtattatgcttttctttatttttaattgttaaaatttctttatttcttttttttgagacggagtctttctctgttgctcagctctgtcacccaggctggagtgcagtggtgcaatctctgctcactgcaacctctgcctcctgggttcaagtgattctcctgccccagtctctcaagtagctgggactataggcgtgcaccctcacacccagctaatttttgtatttttggtagagatggggttgcaccatgttggccaggctggtcttgaactcctgacctcaggtgatctgcccgccttggcctccaaaaatgctgggattacaggcatgagccactgtgcctgggccagtttgagggattttaaagtctgaggcctcatagtgagaaaataataataatcatcatctgaggaatgcggagtccttttaaattatcaggcccagagagacattaaaatgacacagcagtcacctcgtagttcccacccccttgagctatttacttatcactcgaaagtacttcatattgccacatagctacagattaacctaacagtgccccaaggacactgtaatccacagctcaggagtttgagctccagcgatctgcctgcctcggcctcccaaagtgctgggattacaggcatgaaccaccacactgggtctgtagtaaattcttgagttatattttgtgccttagcctcctgcttttaggtcagtatttgtgtacccttcccactgccagtggaaagctgaaatgagcccatccaggaagtggctgcctggagacagggcccaccttgtagggaaaaactgctttttcaccttcttgttgagtgtttgcttttcttctcaaatatcatctgctttctgaacttgtgaactggcagctgcctacctaaatgatgccaataactggcttactgacttttattcaaagtattttcccgggattttggtgtatttatagcataatttggacttggagtctaaaaggagtcatgcattatggctgttggcaattgtggatttttaaaggtagtattttcacctatttctttcttttttctttcttttttttttttatgagacagagttttagctctgttgccaggctggccgtggtgtgatctcggctcactgcaacctccgcctccagggttcaagtgattctcctgcttcagactcccaagtagctgggattacaagtgcccaccaccatacctggctaattttcatgtttttagtagagacagggtttcaccatgttggccaggctggtctcgaactcctgacctcaggtgatacacctgcatcggcctcccaaagtgctgggattacaggtgtgagccactgtgcctggccttccattttcttttagctattgtttcatttctaacaataaaggcagctagaatttcttttggtatttgatatgagatagtccccattttttccccaaacagctcgttttccccattatcatttattgaataattcctcctctttcccgttagtggaaataagtggcatagcctatgaactgtggccagctgggcacaagatgggtcaatccctgagactctcctaggaattgtcctgctgccccctggtgcccggcaggcactttgcattcctctgcccacacctgatccagaggtgatctggggtcagcagcagggtggaggctaacaacgaaggacttttccctaaatatgggcattgagagggatctccagatgcatctggcccacagaaagtggttaaatccttgctcccctgttgctggccatatctcagtgggtgaagtgtcatcttgcaaagcctgtgctgctgtggaaactgccactggtgaccagacagactctctggagacctgccctagagagctgatgacatgactatagaagcaaacacaagtggctgagggcaggggatggcttagagaggaagggtgtgtgaggccctcagtcaatgcatcaaatgtttaattttatattttctttttctataataaaaaaaatatttttcttgtagagatgaggtctcactatgttgcccaggctggtctcaaaatcctgggctcaagcagtcctcctgccttggttttcccaagcgttgggattacaggaatgagccactattcctggccatttaattttgtgtttttgtgtgtgtgtgtgtgtgtgtgtgtgtgtgtgtgtgtgtgtgtgtgtgttttgagacagggtcttgctctgttgcccaggtgggagtgcagtgatgcaatcatggctcattgtagcctcaaattcctaggcttaagtgatccttccagctcagcctcccaagtagctgagctacaggtgcacgccaccacacctagctaaagtgttttttttttttttttttgacggagtctcactgtcacccaggctggagtgcagtggtgtgatctcagctcactgcaacctctgcctcctgggttcaagtgattctcctgcctcagcctcccaagtagctgggactacaggtgcctgccactatgcccaactaatttttttgtgtgtttttagtagaaatggggtttcagtatgttggccaggctggtcttgaactcctgaccttgtgatccgccctccttggcctcccaaagtgctgggattacaagcatgagccaccgcacctggacacctagctaattttttgaggggcgggggacggagtcttgctctgttgcccagtctggagtgcggtggcgtgatcttgggtcactacaatctctgcctccagggttcaagtgattctcctgtctcagcctcctgagtagctgggactacaagcgcacgccactgcatccagctaatttttgtattttcagtagagatgggatttcatcatgttgaccaggatggtcttgatcttctgaccttgtgatctacccacctcggcctcccaaagtgctgggattacgggggcgagccactgtgcctggccagtaatttttattaatacatttttggtagagaccaggtctcgctgtgttgcccatgttggtcttaaactcttggcttcaagtgattctcccgccttggcctcccaaagtgctgacattgcaggtgtgagtcactgtggccggccaaatagtaaatttctgtgtctgcagaatcacagtctcttggggttgagcatcctgaaatctgcattttttaaagcattatttcctggttgattcagatgctgagatttgggagccacgtttctcaggtctttctcagtctttggtgtccaattctacttgatcggtgtctgggaggccaaggttactgccttgatcctctgcggtttagattattcatttagcaaacatttgagtgccttatttttattttattttttgtttttaattttttaatttttgagatggagtttcactcttgttgcccaagctggagtgcagtggcgtgatctcggctcattgcaacctctgcctccggagttcaagcgattctcctgtctcagcctcccaaatagctgggactacagatgtgcgccaccatgctcagctaattttttgtacttttaggagagatggggtttcaacatgttgtccaggctggtcttgaactcctgacctcgggtgatccacccacctgggcctcccaaagtgctgggattacaggcgtgagccgccatgcccagcctggactatgttttctaccccaaccttgtggtcagaggtgaccatgaaactgagacctggccaataggaagtggttgcaaaaggtgtctcgcttccacgactggaacacaaaaaccagccccatgcaacgcctctccagctgaataaagaggcctcctggagaggaggaggactgagaggaggccgagccgcaagatggtgaaagtccagctaggagtaaatgtatggtgttgttcaccaccctagatggcccaaaaggggactatagcatgacaataggcatggtcttggtttcttgttttcttttttgagacggagtctatctctgtcttgcaggctagagtgcagtggcgtgatctcggctcactgcaacctctgcctcccgggttcaagcgattctcttgccttagcctcctcccaagtatctgggattacaggagctcaaaaccacgcccggataattttttatttatttatttattttgtatttttagtagagaaggggttttgctgtgttggccaggctggtctccaactcctgacttcatgtgatccactgcctcggctggtgattttgaattaagccattgagaatcagggcttgtttaatagctagcattatttgcacgatacagtggctgcctccctcattgtgtgagctctttgagaacaggaatggtactttattgtaatggatttgcacctggcaagaaagaaggcaccctgccttctttcatggtggcacatgcctgtaatcccagctacttgggagaccgagcaggagaatcgctttaacccaggaggtggaggctgcagtgagccaagattgcaccactgcactccagcctgggctacagaatgagactctgtctcaaaaaaaaaaaaaagcaaaagaaaacgtagtccaggctgggtgcggtggcttatgcctgtaatcccagcactttgggaggccgaggcaggtggatcacaaggtcaggagttcaagaccagcctggccaacgtaatgaaaccccgtctctactaaaaatacaaaaattagctgggcgtggtggcatgcacctgtagtcccagctactcgagaggctgaggcaggagaattgcttgaacccgggaggcagaagttgcagtgagccaagatcacgccactgcactccagcctgggcaacagagcgagactccatctcaaaaaaacatagtccgtgtgtccagcagtcgctgctgcaggagttcatcctgaacccgtgttgggtgtgctggagtagaagtatggaaaagctgtgtgagggtggggattttgtttttgtttttgttttttgagatggagtctctgtcgcacaggctggagtgcagtggcatgatctcggctcactacaacctccgcctcccgggctcaagcgattctcctgccgcagcctcccaagtagctgggattacagatgtgcaccaccaggcctggctaatttttttgttgttgttagagacagggttttgccatgttggccaagatggagatctctggggaggggtttaccttcctgttggagcttggatggagaaggtgggaaatcgttcctggcaggggatgagatgtccaggtcacagaactgcagttggagaaagtgttgcctgagacgtgtggcgaatgaccacccctcagtcgctatgtcgtccctgccagccggtagcgtttgttacacccaaggttgccctcccctctttcatcccagcagatgttcagactttgcttctcccacttccagccccttactcatgagtacttacagcccttttgtggcctgcgacgtagctccttgttccatttctgggttccatgaccacttccgtgctggtctgtttcaggcctagtccctgtctgctcttttctctgcgctagctcctatcttccccttttccttagtgtcatagaattagtgggttgaaaggaagagatcttctagcccacactcagtacaggaatcccttccagatactgggcagtggggaaatgcattatgtgactctcatgactttagattcgaatgccagaattatgttgtattgagccacagttttctttccatgcaatttctacttgtgtttacttacttctaagaaaagcattacagaatttaatgaagcaaagaatgatctgtgaatcaagcagctcctagaaccaaaataggttcagagccgctctcctttgtttttttgtcaacacgcagagcaagttggctacctcccttcatatgctcgcctcatagtattcaaagacagctatcatggccacattaaatctttgtttctttgtttgagacagggtgtcactctgtcacccaggctggattgcagtggtgcgatctcagttcactgcaactttcacctcctgggctcaagccatccttccacctcagccccctgagtagctgggaccacaggtgtgtgccagcatgcccagctaattttttatattttttgtagagatgaagttttgccatgttgccctggctggtattgaactcctgggctcaagtgatcctcccgccctagcctccaaaagtgctgggattacaggcatgcgccatggtgcctggacaggagtttatttttgaccctgttaagtttgagatgcctgctacacattcaagtggagatgttgaataggcattcaattggtcatgagtttggggctcatggagaagtttatcttattattattatttctttaaatggagtttcactgtgttgcccaggctggcgtgcagtggtatgatcttggctcactgcaacctccaccttctggttcaagcaattctcgtgcctcagcctcccgagtagctgggattacaggcacgcgccaccacacccagctaatacttgtattttagtagagatggagtttcatcatgttggccaatgtggtcaggaagtttatgtcaatttgggcatcatcagtgatacatgcagttgagctatattggacacatggccaattgacctcacagtccgcagggcttgtccccatgtaactgctcttctatccctatgcaaattcattttgtagatgctaacgtttagcagctcattgttgctgttgaaagttcttggaacactttcgtagtctgaatgctagaaaggatgggtcctaggaatgtcctctaggttgtggcagatccactaatcaacactgtggttgctagattaacttggccacaagtgtcaagagaggtcgtgtcatatggaggtctgctttatggaagtcaagaggtattggagtattggatcacctgggcacttctgtcttttttttttttttgagacaggatcttgccttgccagccagccttggagtgcagtggtgcattcatagcttattggagccttgacttcccaggctcaagtgatcctactgcttcagccccccaagtagctgggactacaggtgcgggccaccacagctggctaatttttctaattttttgtagaggtggggttttgccatgttgcccagactagtctcgaactcttgagctcaagtgatccacctgccttggcctcccaaaatgctgggatgacaggtgtgaaccgtcatgcccagcctgggcagtcattcagaaaccctaccaagaaaagggttaaagtcatttggcatggtttcctctttttttttttttgagacagggtcttgctctgtcgcccaggccgaagtgcagtggcgcaacctcagctcagtacaacctctgcctcccggggttcaagcggttctcctgtctcagcctcccgagtagctgggattacaggtgcttgccaccacacccggctaatttttgtatttgtattttttatttttatttatttttttgagatggagttttgctctttttgcccaggctggagtgcaatggcgcgatgctactgtgcctggcctcacgatttcctcttttttttttttttttttttttttttgagacagagttttgctcttgttgcccaggctggagtgcaatggcacgatcttggctaactgcaacctctgcctcccaggttcaagtgattctcctgcctcagcctccccagtagctgggattataggcatgtggcactacgcctagctgatttttgtatttttagtagagatagggtttcaccatgttggccatgctagtctcgaacgcctgacctcaggtgatccacctaccttggcctcccaaagtgctgggattacaggcgtgagacaccacacccggccatgattcctcttaacacaagctggctcttggtgctgcttttcatgaatatactctcaaattgctcccttcaaatgattgttgatgtgcattatttcttttaaccttattagctttattttttctaaattctttttagattacatagcagtttcttagccctcaccatgattggatcacctggacagccataaaaatatggatgtctgttccccttataggccaattggaaaaataatttctgggggtgggatccacgcatctatctatctatcatctatctatctatctatctatctatctatctatctatctatctattttttttgagacagagttttgctcttgttgcccaggctggagtggaatggtgtgatcttggctcaccgcaacctctgcctcccgggttcaagcagttctcctgccttagcctcctgagtagctgggattataggcatgcgctaccatgcctggctaattttgtatttttagtagagatggggtttctccatgttggccaggctggtctcgaactctcgacctcaggtgatccgtcagccttggcctcccaaaatgctgggattacaggtgtgagccaccgcgccccgcacatcaatattttaaaaaggttctctacgtttctgatgggcactgaagcccaagaaccactgatcaactgcttgccaaagtcaaaaatatttctgtgcatatttccatttttctggccaaaggttcgctgcccctttttcaggttcctctcaaaggacttgtctgatctcaaagcatgagaaccattaccacaataggacttactcccctctgtgggtgctcagccagtggctgagggagaagggggattgctccgtgccagggatgttgttagagatgccgggttcttcgatttttatagtaaccccttgttgagggtggctctgctcttgtgttacatacaggtgaaggaaactgagagagtccaggtagcataatgagggtcacccaggcaggacatgatggagttgggaactgagtcaagtctgacaaattccaaagcatgagctgcagcctctgcgtcactatgtttattttctcaccctgggtcagagattaattgagctcatgagagtacttgacaggaaatctcacacttgtgaattcagagctcgtgagcataaaattgctcttctaatcacttgcttttatttgctgatctttattggtgcattttattggtcaggatgtgattgagattatgtaataaacccaactgaccgcttcttttaacttctgctattgaagtaatccctcagattactgtcttgagagacggagagtgcatacagtccaacagtgtgtactcttcctctttaaagacagtagaaaggtatccatcttgttttaaatagtagcagggaggtttatcaatggcttaacatggtaggctgggcctggagagctctcaatgtaacagagctcaaatgtggcatttacatgaattctaagttgattaagcgacacaatttgttcaactataaaacataatacattcttaatagattttacctattattgtatatgtaagttcctagtacatattaggctgtaggtaaatgggatgatgagggttcttgctaaatttatcccccatccttttttttttgagtcagagtcttgctcttgagcaacctccaccttctgggttcaagcagttctcctgcctcagcctcccgagtagctggaattacaggcttgtgccatgacacctggctaatttttgtatttttagtagagatgggactttgccatgttggccaggctggtcttgaactcctgacctcaggtgatccgcccacctcagcctcccaaagtgctgggattacaggcatgagccactgcgtccagcctaaatttacccttttatcatgccttttttattgtcttaagtctttaagtcttatttaagtcttgactcatttgcgacttttttactaaattgttagctctattaaggcagaaaccagtatcttcaatgtcttaatctctcagtgactggtttaacatcttgcaattaatatgcttaattaatgtttataagctattactttagtcttaatctcaatttcttgaatttagagttgctgacacctgtgtcttaggtaggaccaagtgagaagctagttattgtgacagcctcagactggagccagaagacccatgatcttgtatatattagctgtgtgtgaccttaggcaagacacatgaccactctgggcttcagtatcctattctatgatttagaaaaattaaacctactcatggcatgttttaagaactatattttaaaaatacattataaaatatttatttatttatttattatttgtgtgaggcagagtctcactccgttgcccaggctggagtgcagtggtgcgatttcggctcactgcaacctccgtctcccgggttcaagtgattctcgtgcctcagcctcccgagtagctgggactataggtgcatgccaccatgcctggctaattttttgtagttttagtagagacggggtttcactgtgttagccaggatggtcttgatctcctaacttcgtgatctgccagccttggcctcccaaagtgctgagattacaggtgtgagccacctcatctggcctatttatttatttatgaggtctttctgtgttgcccaggctagagtgtagtggctattcacaggcacactacatcctcaaatttatggcctcaagaggtcctccttcctgatcctcccaagtatctgggactggctccaagaggtgtattttaaggaaaaagtttttttttttttgagacgaagtcatgcccttccacccaggctggagtgcaatggcgtgatcttggctcactgcaacttctacctcccagattcaaacgattctgctgtctcagcctcctgagtagctgggattacaggtgcctgccaccatgcccagctaatttttgtatttttagtagagacggggtttcaccatgttggccaggctggtcttgaactcctgacctcgtgatctgcccaccttagcctcccaaagtgctgggattagaggcgtgagccaccatccctggccagttctctttttttggagacagagttttgctctgttgcccaggctggagtgcagtggcacaatcttggctcactgcaaccttctgggttcaagtgattctcatgcctcagcctcccaggtagctgaaactataggcatgtgctaccataccgggctaattttttgtattttattagagataggtttcaccatgttgcccaggctggtttcaaactgctgagctcagccaatctgcccaccttggcctcccaaagtgctagagttacaggcgtgagccatcgtgcccggtcaatgaaacaataaagttctatacacttatttttcttttcttttcttttttttttttttttgagacagagtttcactcttgttgcccaggctagagtgcaatggcatggactcagctcactgcaacctctgcctcggggttcaagcaattctcctgcctcagcctcctgagtaactgggattacaggcgtgtgccaccacacctggctaatttttgtatttttagtagacaaggggtttcaccatgttggccaggctggtctcgaactcctgacctcaggtgatccacctgcctcagccttctaaagtcctgggattacaggcgtgagcctccgcgcccggccttatacactaatttttctccctcacctccaatcaagcagggaaagtgaatatggaagtaggtcagtgtataatgtcccatctctggtgaatggagaagtcacctgtttgtaagtccccccagaaatgaagatctattaaaaaaacaaaggccacaaagggaaatttaattcatactcagaagtgggccactatctatggaagtacttggaaaataataaggtgcgttattattacatctttaagaagttttcctgggctgggcactgtggctcatgcctgtaatctcagcactttgggaggccgaggcaggcggatcacctgaggtcaggagttggagatcagcctggccaacatagtggaaccctgactttactaaaaatacaaaaattagctgagtgtggtggtgggcgcctgtaatcccagcttctggggaggctgagacaggagaatcgcttgaacctgggaggcggaggttgcagtgagccgaaattgtgccactgcactccagcctgggtgacagagtgagactccgtctcaaaaaaaaaaaaaagtttttctggaaagcagtttcacagcagagcaacaaggctgaaattgccccagtcagcctttgctggctgacttccctttttccgttaatagcaccaccacacccagtaactaaggcttgcgtcctcagttatctgcacgtagggaagagtctggtcagtgataaaaggtagttggtcagttgccacgtcttgactggaggcacgcaatgattccagattccaacccagtcaatacactgcaggctttatctttacaaggcatagctctgctgctttctgttccagaacctttggtggcatcttctttggcatttaatactctccttttcctggtcctaacttagctttcctacattctcagatatccattgttcctggacagtcaatatatgatgcctttcccctgatcacaccttatatttgctgtcctgttcccttagctcatgttatataccctggctagagtacctacctctcagctcggctgctaaaattctccctgaaaacccatccattaaccaacttctagtccattattcagaggatatggaactgctatttatttatttatttgagatggagtcccgctctgttgcccaggctggagtgtagtagtgtgatcttggctcactgcaacctctgcctcctgggttcaagtgattctcctgcctcagcccccaaaatagctgggattacaggcacccgccaccatgcccagctgattgttgtgttttagtagagatggggtttcaccatgttggtcaggttggtcttgaactcctgtcctcaagtgatcctcccgcctcagcctcccaatgtgctgggattacaggtgtaagctaccacgcctggcccctatttatttatttatttaagagacggagtctcactctgttgcccaggctggagtacagtggtgtgatctcagctcattgcagcctctacctcctgggctcaagtgattctctaatcacagccttttgagtagctgggattgcaggcatgtgccaccatgtctggcttacttttgtttattttttgtagagacgagatctcactatgttatccaggctggtctcaaactcctggactcaaatgattctccttcctcggcctctcattctgctaggaatacagacatgagccaccatgcctggcctggaactactgtatatttagacattataattatgtactgcttcctgtaggcaggggggctattctaagtaccttaccaataaatattattaaatactaataacaaacctttggggtgggtactattatttcccacggtcacacagcctttgagtggcagagcctaggttcaaaccaggtaggtaacttagcacagagtccctgctctcagctgcagcgtcatgtacctcttgattataggtgctgggaatacagtgaccctggtccctgccctaaggggcttatgttccagtgggagtcaaaccatatacatttttgagtctctgctgtttgccaagcacaggggacaggggtgtctgccgaaaaggccgtgtcatctgtgtagctgctagacactgtcagttccctgtgggcagtgtccttgcctgtatatgtcccaagtacctgacctagtcctggcacaaagtggctcagttggctgggcaaggtggctcatgcctataatcccagcactttgggaggctgaggcaggtggatagcttgagcctaggagtttgtgaacagcctgtgcaacatggtgaaactcttgtctctacaaaaaatacaaaaattagccagtcatggtggtgcacacctgtagtaacagttactcaggaaggctgaggtgggaggatcacctgagcccaggaggttgtggctgcagtgacacatgatcgcacccctgcactccagcctggacaacacagtgagaccctgtctcaaaaaaaccccaaaaaacaacaaccaaaatctcaaacaaaaccaaaacaaaaaacaaaaaacctgcctcccaggttcaagtaattctcctgcctcagcctccccagtagctgggattacaggcatacgacacatgccaccacgctcggctaatttttttgtatttttagtagagacggggtttctctatgttggtcaggctggtctcgaactcccgacctcagatgatttgcctgcctcggcctcccaaagtgctgggattacaggcgtgagccactgcacctggcgccactctttttttttttttgagacggagtttcgctcttgttgcccaggctggagtgcaatgacgagatctcggctcacggcaacctctgcctcctgggttcaagtgattctcctgcctcagcctccctagtagctgggattacaggtatgcaccaccacgcccatagagacggggtttctccatgttggctaggctggtcttgaactcctgacctcgggtgatccacccacctcggcctcccaaagtgctgggattagaggtgtgagccactgtgcctggccccctctcttaatctctgcattctgctgccactcagcatgagatgctcttcagaaaaaatatccttctggctgcaatataaagttaggggagggcaggaatggagggaatgagttaggagctagctacagtcctagttgcttgggaggctgagatgggggcattgcttgagcccaggagttcaaggctgcagtgaggtatcattgcaccactgcactccagcctgggagacagcaagaccctgtctcaaaaaaaaaaaaaaaaaaaaaaaaaaaaccacagaaaaacttcaaggtggctctaggattagcagcatcagcagcagcctgtgttttaatcagtcctccaagtgattctgatgcatgctgatgtttgagacccactgccacaggaccagtttttaaacttttttttttttttttgagttggagtcttgctctgttgcccaggcaggagtgcagtggcgctatctcagctcactgcagcctccgcctcccaggttcaagcgattctcctgccccagcctcccaagtagctgggactacaggtgcgtgccaccgcgccaggctaattttttgtatttttagtagagatggggtttcactgtgttgaccaggatggtcttgattcctgaccttgtgatccacctgccttgggatcccaaagtgctgggatacaggcttgagccactgtgcctggccagtttttaaacattttgatcacgttctacaagttttacatatgtaatgaccaagagatatattctctttctctctctcacacataacatatttaacatactttaggctggacacggtggctcacacctgtaatcccagcactttgggaggccaaggtgggcagatcacaaggtcaggagtttgagagcagactggtcaacatggtgaaaccctgtctctactaaaaatacaaaaattagccaggcatgatggcgtgcacctgtaatcccagctactcaggaggctgaggcaggagaattgtttgaacccgggaggcagaggttgcagtgagtcgagattgtgccactgcactccagcctgggcgacagagcaagactccttctcaaaaaaaataaaaaataaaaaaataaaagaaaaacatactttagtaaaagtttcaagaaacagtgtcctgtcttaggaaacatgtgacacactggtattttcgattctgtttcattaaacaaagtgctttgagacctgtcagaacccctgctcttgagcaaatcaagaaggttgctgtgctgcaagggtgcacttccaaagccaccttcagtgggactttcctgtctttgaagaagcctttcacttccagagcttgacccagggagtccttgtttctctaagtctggacctgctcctttatcacccatattacgggctgaattatgtccccccaaagttcgcatgttggagtcctgatctctagtacttcagaatgtgattgtatttgaagacggggattttttttttttttttttaagatggagtctctctctgttgcccaggctggagtgcagtggctctgttgtccaggctggagtacagtggtgtgatctcagcccactgcaacctccacccctcccaggttcaagcaattctcctgcctcagcctgacgagtagctgggactaccggtgcgtgctaccacatccgggtaatttttgtatttttagtagagacggggttttgccatgttggccagcctggtctcgaactcctaacctcaggtgatctgccctccttggcctcccaaagtgctgggattacaggtgtgagccatagtgcctggcctgattgtgattttttttttatggcagcctgagcagactatattacagcccacaagcctcacaaagatattgcctggagttagtgccactggttgtcattttccagagctgctttgtagggcagtaatgtgtcctctgttagactgaactcgccaaggagtttgaccctctattccacctgcttattatagaactactccctcttttcctcatatttcttgggttgagtttgggtaagattactaaaattcttcagatgtggaaccaatcttcataaacacttcagaatactttgcttccttctgaattactacagacaagcagtctgggaggtccaagtctgtataattattgttcttaacattctgtcactcattattgttggtgttcgtttctcaatgccagatgaggtgtgtcttgggcaaaagcctgtccagtgtaagctgttctgttctttcaggcagaatcactcagacttatgctctcaactttctctctctctttttttttttttttttttttttttgagagagtctctgtcgcccaggagtgcagtggtgtgatcttggctcactgcaacgtccacctcccagattcaagtgattcccctgcctcagcctcccaagtagctgggattacaggcttgcaccaccacacccagctaatttttgtatttttagtagagatggggtttcaccatgttgccacagtgcctggcctgaactttctcttttacagccacatgcaaattacctgaactatctggcttttgggaaaaccctgtgcaagttcttagcatccagtattaaaagaaaagagatggctctgttctcttagcaactcaaaatcctcttccttctccccctttaaaatataatgtagtccttgtttttccttaaaataaatattttaaagagaaaattggtccatttgaagaagccaaaataggatctcttcccctctccttgttgctgtctctctcgagtggattttggtcatttctgctaagtttgcccagaaaataggctgaagtctgtggaagggaaattccacaaagctgcctcatgtccacagttcctcgggaggaattcctttcctgtaaggaggaggcacattttctgagagtcccttccaggaaggatgaggtgcagcaggaaggaatcccacagagagccgtctcacagacacagaaaagggaaggaattgcctttgacttctgggaattggatggttttttttttttttttttttttaatagaaggcaaaacagcaaatggcagctactagtgactgactatatcaggttttggaaaagtgggcagtgagggttttgttgattggattgaactctgcttggcaaaccatagatgaccctgagtaagccttaggccttttttttttttttttttgagatggagtctcactctgtcacccaggctggagtgcagtgtcatgatcttggcgtaccacaacctctgcctcctgggttcaagtgatcctcctacctcagcctcctgagtagctgggattacaggcacctgccaccacacctggttaattttttgtattgttagtagagatggggtttcactatgttggtcagggtggtctcgaactcctgattacaagtgattcacctgccttggcctcccgagccttagcccttttgattccctgacatcaaatgctacttctcttggatagttatactgtgagaagttggtgacgggcaaaacgggagcccaggccagtgtcagaaactcacccagagtcgcagggacaaagctgttgtgtgggttcttccctgtgagaatcttaaggatggaaatggtgagcacaaaccttggcatttaaggaccgacaatgctgagatgttgtggtgggtccttgagtagggctcaagtgtccttccagggtggtggtcccagggaattgggccagaaacaaggccacccagtctcagctctgttgttcctggggggccctgtggctccaggagctcgtgaacatggcgaaccccacttccccatcccctttctgccttctcttctgttctcttgacagtctctgttttctacccactggggtcagcaaatcagccccttttaccggtttccacaaaaatccacaaaaagcactgtgaggacttggggatttcttgaagatttgggttgaggtatttcaggagggccttgcctcgcccctttccactccatcttcctctctgctccccacttctctggaataagaggtactgccctccttatttcagcgctgtcattctgatcactctaggaccggttgagactttttcgtgaacagtttcctacctttttaggcaaccatctgtaagacaaggtagaatgctaccataaccatgattaacatttgcaaacactctgccacagtgcagccactttctttgtctccagctgaagaaattgaggtgcacagaggttaaatttgatgctcaaagcaatacaactagaaaatataggaggctgggctgcctgattgattcccagcttagagattgaaagtcacatgcgaagcgctttagcagatagagaagggggagtcatactccagtgtgcattttagtttgtgcttttctgtccttgaattaagaagtgtgacgtgtgcctccaacagcatagcatgctacagaaatggatttcttttcctggggttgataatctgctggccaaatctttatctctgtagtatcctgtgtttcctggtgcattttagcatttggttaaattgtagggaaaagggtttgtgttctttatatctggattgtctattagatcacgtttttttgtgttgttatttgcgtctttttttttcctggaaggaagtgattggctgtaacagtttctctcccactccggtctctgaggaaggaaaaaaaaaataccttggtttcatatgaaattagactaatagaatttctaattatctgagttcattgagttgttgtcagtctgtgtttttttttttttttttttttttttttccgagacagggtcttgctctgtctctcaggctggagtataagtggtgcgatcatagctcactgcagcctcaacctccctgtgctcgggctcaggtgatcctcccacctcagcttcctgagtagctgggactataggcatgcaccaccatgcctggctaatttttgtttttgttttgtagaggcagggttttaccatgttgcacaggctgctttcaaactccctggctcatgcaatccacccacctcagcctcccaatgtgttgggattataggcgtgagccaccgccccttgcctctctgtctgggcttggtcctcctgggaacctctgccttgatcacccatctagaagaatggaggacctctgccgtttcagtcatccttttcacctgtaccagttggcccaggagaatcctggtttatatcccttatcacactgccactattaagctccccctttcactcctaagagtatcccaggttagatgatatgaccatgaatggagctgaagttcatattatacataatatgaagtatacataaggtatacgggccctctaaagccatggggcataagcacaaactgtgggcacagtgatgtaaatatttgctaaacttttatccaaagtaatgattggtaaaaacctggtagcatctccacttgagcagacatcttcagaaataacctgtaacctgtgctttatacataagaacaatggcatgcggcgttctctcctccgtccctgggttgaccgcggtggggtagggggtcagacttgccttctccagtggggcaagtccccttggtggtgactgtcctggctgttgttccaatctgagctagtttcttcataagtcaattgaaggtgcagtattaccctgcagggtggaccaaggaatgtgttagccatgcttgctgcctttctccaggacctgaagccccgccaccctctcctggggtccctttttctctcccttctgcgggacacgttttgtgatctctgcgcaaacagaggcaacacacttagtcattaaggatttttctgtaagtgcattagccttaggcttcagcacttgctgttctctttgcttggaacttgttgaccctgctcttgtcactgggggctttgtcctcctgggaaactctgccttgaccacccatctagagtaaacgcccccattcactaccatggctccctactttctttgtggattttttttttttttttgagaagtctcactcttgttgcctaggctggagtgcaatggcatggtcccagctcactgcaacctccacctcctgggttcaggcgatcctcctgcctcaggctcccaaataactgagattacaggcgcccgccaccatgcccggctaatttttgtatttttggtagagacaaggtttcaccatgttggccaggctggtctcgaactcctgaactcaggtgatccaccctccttggcctcccaaagtgcttggattataggtgtgagccactgtgcctggccttctgtgtggatcttactgttactctgaccccctctttttagtgtgattgcctttccctctcccctctcccttccccaatgtgaactctgtaaaaatgatcctaggtctagaacctataagagtgcctgttagtggtgggtgcttaagagttaatttgaattaatgaggttaataattcttgtttccctatagtcctgttgttgagattcctggttagaaaaaaaagtgagttgtgggttgtatactttgtttatttatttattgtatttatttatttttgagactgagtctcgctctgtcgcccagtctggagtgcagtggtgcgacttcggctaactccaacttttgcctcccggattcaagcgattctcctgcctcagcctcctaagtagctgggactacaggcgtgtgccaccacactcggttaatgtttgtgcttttagtagagacagagtttcaccatgttggccaggctggtctcggactcctggcctcaggtgatctgcctgccttggcttcccaaagtgttgggattacaggcgtgagccactgcggctggcccgtgggttgtatccttttttattaataaaggcatctctatatgctgtggtttgagaggggttgaaggctacttcccatgggaatgagtgaggaagagcctattgcactctggtgtctttgagggaaagagaggcgggtggctgccttctctgctcttgggttccacagctggggattgggaggttactcttttatcaattggttttttctttttttctttttttttttttgaggcagggtctcactctgtcgcctaggctagtgtgcagtggtatgatcacagcttattgcagcttcgttcactttttttttttttttttttggagatgggtcctgtactgtctcccaggctcgagtgcagtggtgagatcatggctcactgcagccttgacttcctgggcttaagtgatcctcccacttcagcctctggaatagctgggaccacaggcgtgttccaccatgcctagctaataaaacaatttttttgtagggactaggtcttgccatgttgcccaggctggtctcaaactcctgggcttgagcaatcctcctgccttggcccctcaaagcagtgagattataggcatgaaccattgtgctcagccctgagatttgttttaaaaagtgccctgagattcactatggagtattccctcttgatttatttcctaccaagtaagccctttaacagaccatgtatggcagctttttgaagaatgttttaggtctttctaaatatgcagctattcaggctaaggattggcatgtttgtaattgacctaatgattcaaagaatggactggttcagctggaattttcctaaaatctatcccattgacagagtattgcacaattagaaaagtgtatgatttataattagcgtacccactttaactctgaataacaggcataaaggttattatattttgaatcagtgttaacagttttagacagctgttctttgttacttgatttttttttttttttgagacagaaacttactctgtcacccaggctggagtgcagtacagagatttctgcccactgcagcctgtattttgaggcacagttgtttttgctcattagagtgctgctgagagagttgatttcctagttctagagtcaccgccaagagtcctaaacattttcctataagagagatggtaaggatggttacaaagaagtaggcctgatttggtgtagaaaattggtttcatgttcaaagccaacaaggggatgggggagttttggatcagacctttgattctggcgcagagccacaagggctttgtgtgttttgtttacagagcttaagcaatctcagttattagcttgcggataattaccagaaatgtgaacttaaatctgtgcttatttatttaactccttgccttttctcctaagaatgtagggtggtggcattataaaaattaaagaaaaagcaaggctccaccactttcatggtgattctactttacctgcagtaaaatcacagcatgatggccaaattgcccttcctctccaaacttcataccatttactataaaataatttggatcatagggtgatgtaggcctggggctgaagtctgtgtcagaatgttcctgtggaggtttatatgttaaaaattaaaatgaaaacctgttttattttattttttgagacggagtcttgctctgttgcccaggctggagtgcagtggcacaatctcggctcactgcaacctctgcctcccgggttcaagtgattatcctgcttcagcctcctgagtagctgggattacaggcacccaccaccacacctggctaatttttgtgtttttagtagagacagggttgtaccatgttggccaggctggtctcgaactcctgacgtcaagtgatccgcctgcctcggcctcccaaagtgctgggattacaggcataagccaccatgcctggcttattctatgttgttttttgtgatggtcagtgagatgtggccacaggaggaggcagaggaggtgctcaggaaggccaaggttattatactcacaggtcttagagacgggaagcatgtcatgccctgcagggccacatggggaagcatcagtcttggtcccccctgtaggagcctgaaggggcaggagtgaggggagagcctgggccatggtctttcttgagctttcagggacagggcaggggagtgcatgtgaacagtttagaattggctagtttgaataattttggcaggctgtaagctacaggcatggtttctagttgcttgttatcaggctctggcatgatataggtgaagaaatactgcttcctggggtggacaggctagataaagacggcatagctctgggttggttggtttgcatatcagagctgtgctcctggctgggcccttctggttctaagaactggccagctctgggaaggacagtctctccccagccagagaggtttccaaaacgtcaagacatcatagtatgcacaaagtaaaaaatataaacagtacaaaggccctgaacagggtcaccctgctgtatgagaaatctactggcctggctgaaggggaaagttgcttgggcagaacagtgaaaagctaaagcaggcttgttagttgtatgagtctgttttcacgctgctgataaagacatacctgagactgggcaatttacaaaagaagaggtttagtggacttacagttccatgtggctggggagacctcacaatcatgacagaaggcacggaggagaaagtcacgtggatggcagcaggcaaagagagagcttgtgcaggcaaactcttatttttaaaagcatcagatatcgcgtgaaccccggggggcggagcctgcagtgagcctagatcgcgccactgcattccagcctgggcaacagcaagactccgtctcaaaaaaaaaaaaaaaaaaacaaaccaaaaaaaaaacccatcagatctcgtgagacttatccactatcacaagaacagcacaggaaagacccgcccccatgattcaattatctcccattggatccctcccacaacatgtgggaactgtgggagctacaagatgagatttgggtggggacacagagccatatcagtagtgtaaacctggagccagcaggaagaggcatttgacagagcaggagggtccatggtgctcagtcaaagtcttaggacaaatagtccccatggaacagaaggcaatgcacctggccttgttgcgtttaattttaactttgctgtattttcaatgatctgctcctccagggaactggtggcacaccctgagtctgctaggtgggctaaagactcacaacctgagggaaggggccaggaaagaaaggaagccatggcctagagggtgttatttgggaccccacgcccatccaggccgacagagctgcggtaaggctgagcaaaacacactcgcacctgaacctcactctgacgttgtgggaggccctaccttgtcaaagctgaaagaaacgtcaggaaaagaaaatgcccccaaataattgtaacacatgtgctattggtttggcgactttggtaaaaggtttggaagtttcagggaacattccagataagcagggaccatcttcttcataaattgctctttgaattaggataaaaaaaatcaattgccatagataaaatttctgggatttttatgagcccaacctgttttccaggttaattatgcctaaatatctgtttgttttctttcttgtcatataaagtcattggggtcctgtagggggtgtgtgtgtgtgtgtatgattttgtgttaggtagcaggtgtttaggtttgtccagcacatgtttattttatttttttatttttttattttttgagacggagtctcgctctgtcacccaggctggagtgcaatggtgacatcttggctcactgcaacctctgcctcccgggttcaagcgattcccctgtctcagcctctcgagtagcggggattacaggcatgcaccaccacacctggctaatttttggatttttagtagagacagggtttcaccatgttggccaggctggtctcaaactcctgacctcaggtgatccacctgccttggcctcccaaagtgctgggattacaggcgtgagccaccgtgcccggccccacatgtttagtactagatgctaaaatcaatctgtggccttgtggagtttataatccactgaattaatttagattaattcacaggattaatttagatttcatgtttgaatatgaaatttgtggtcatttaaacagaaactgggctggaaagtacttttttctctgtctgtgaaaggtttttttagggcaaatgaacagtataaattagattgcttagagaatgttgtaaacacattttaccacagacactttatgtgcacaaagaggcttggcgtgttggctcacacctgtaatcccacactttgggaggccaagtggatcacctgaggtcaggagtttgagaccagcctggccaacgtggtgaaacgctatctctagtaaaaatacaaaaaattagccgggtgtgctggcgggtgcctgtaatcccagctactcaggaggctgaggcaggagaatcacttgaacctaggaggtggaggttgcagtgagccgagatcgtgccattgcaccccagcctgggcaacaagagcgaaagttcgtctcaaaaaaaaaaaaatatgtgcttaaagaacatgctggagcatttcctctgaggaagttatctcaggtactagagattaatcagcctgcacctctttgtgtatattcaataatttagattttttgtgagttcaaactggctttttcttaaagttggtggggagaggcatgtgatcagacttcttgggtggttaggagctttttggattgagtcccgtctgttttccaggctgttggctaatggtgattaaaggcccagggaatcctgcttgtctccttccagtttcgtgcagagctatgtcacgctgcgtgctctgtttctgttaggaccaatgtctgtttgttatataaatagaaaaggaacataaagctaaggaaccaagaaggttccattacagatcagtgtctcaacgtatccttgaggtttggtacaagttctccgcttcctgaaatttttggacaaacattgtgacattcataaataccggactgctaggatattgagggctgaggtaacgcaaatacttgctgtggttttatagagtaataatctgttaatcatagctgtggccttagagaataaacaacctctgtgtaggcttctttgtaagaatggcacagctgacggggacctctgcgaaccaaaggccagcgtgtgaccttcttatcctctgcttcctaggccagcagtgactgcctttggagatctcattgtttacagccctgtctctgactcagggtggcagattatgtttttggtagagcccagccagcccctatcacattgcacactaatgtaatccgtcggcagctgtctctgtattcattatttagctgcactaactggagttaatcatagatctgagctaaactttgttatgggtcaagagagaaaggccatctggctatttcttgggtcgtcttgggtgtatttttccactgcttatcatttgaccaccatctgttttttgagacggagtctggctctgtcccccaggctggagtgcagtggcgcgatctcggctcactgcaagctccgcctcccaggttcacgccattctcctgcctcagcctcccgagtagctgggactacaggcggctgccaccatgccaggctaattttttgtatttttagtagagatggagtttcaccatgttaaccaggatagtctcgatctcctgaccttataatcgtctcgcctcggcctcccaaagtgctgggattacaggcgtgagccaccgtgcccggcccatttggccaccatctatgaggcatctgaaagaagagaaactcatgcgtggtggctctgcctgtagcttccctactcagtgtggtttgcagacagtagcattgccatcatctggggctggggagaaacacaggttctcatgctctgtcccagacttagtatcagaatctctactagatctcatgcgtgggccctggccagccccctgttgtgtgcttggttgacgctgggctgctgctggtagacctccctttctcttctgtgccacagggtctcaccaaactgcaaaggaggtgggtaataaagtcaaaccctgtgccaggaatgatgggagaaggaagggtcagacccacaaatgggccaaggaatggattaggtgagctaagctgtggttgtagttcagcagtcactattacgcccaccttttcttattcctttcctatttttcttttctttctttttttttttttttttcacagcctggtaatgtggaatatttacttttcttaaatcactgtattaaaagatgaaaaaagtcattttttctcttccccttcccacagtcattgttgattagagaaaatactaacaaaatatattaatttaatttccaactacagataacaccaatattaatagttgggtgactgtccctcttttcatggagaaaacctaatgcctatcaaatgcccaacgttgaagagctatacaaatgtggattttctggtcgtcttcctccctcccttcctttatcctctcttatgacagaaaattacaaacatgtacaaaagtagagggaacagtaatgaacccctgaataccagtctgtcaacaatgatcaattcccagccaatcttaaccctccttctactcatttcctgccctagaagtgttactttttttggcacatctgatgagtgaagtgaagaatggtatttcattgctctgtttttcttttctctattcttttcttttcttgcaaaaccccacactgtcaccatgcatttgttatgtaattttcagatgtatctgtaggaaatggtcagtatacgattatatatacactgttaaattatccattgaaatcacattgtgtaccttctcactacattttttaacctttatgttataaagcagatacagaatattatacaaacaaatgtgtaacgtggataataaattataaggttaacatcctggtaagtagcaaccagatcaagaaataagattttgctggtccctgttctgtgtcctgtctcaattccaggctcctcccttccctcagaaagaactgaaagtcaacttcaaactctttgtggtctgtattacttttaaatcttgatcaatgttgtgtgtatatatatatatatatatatatattttttttttgagatggagtctcgctgtgtcacccaggctggagtgcagtggcgcagtctcagctcactgcagcctccacctcctgtgttcaagcagtcctcctgcctcagccaccagactagcaggtgagctgcttgtgctgctgacaggttgtaggctctgtatttggaagatttaggtatggcaaatcagggtggcccagcccaccctgacttctagtcaaccagctacaaattctatgcttcccatgacccccttgggttcaataatctgctagaatgactcacagaactcaggaaagtgctacacttacaattacagttttactacagcaaatggctgccaattggaaccaaagggagagtcccaaatacaaagctttcttgtcccatctccagggagttgagacctgtcacttcctagcctattagtgaaggggtggccttcccctccacacctgtgggtgtttctcatcgggtgggacgagagactgagaaaagaaagagacacagagacaaagtatagagaaagaaaagtgggcccaggggaccgccgctcagaatacggagaacccgcgccaggacccgcgccccaggcaccggtctctgagttccctcagtatttattgatcattatttctcggagagggggatgtggcaggacaatagggtaatagtggggagagggtcagcaggaaaacatgtgaacaaatgtctctgtgtcataaacaaggttaagaaaaaggtgctgtgtgctttgatgtgcacatacataaacatctcaatgcattaaacagcagtactgccgccagcatgtctcacctctagccctaaggtggttttctcctatctcagtagatggaatatacaattgggttttacactgagacgttccattgccaagggccaagggacgagcaggagacagatgccttcctcttatctcaactgcaaagaggccttcctcttttactaatcctcctcagcacagaccctttagggtgttgggcaggggtacggtcaggtctttcccttcccacgaggccatattgtagactatcacatgggagaaaccttggacaatacctggctttcctaggcagaggtccctgcagccttcgcactgttttgtgtccctgggtacttgagattagggagtggtgatgacttttaagaagcacgctgtcttcaagcatttgtttagcaaagcacatcctgcatagccttaaattcattaaatcatgagtcaacacagcacatgtctctgcgagcacagggttgggggtagggttacagattaacagcatctcaaggcagaagaatttttcttagtgcagaacaaattggagtctcttaggtcttcttctttctacacagacacagtaacagtctgatctctctttcttctccccacatagtagtgtctgacaatgcccagagtattgccagccaggaaatctcatccaggttttggtgtctggagtttttattggagcttcattacatcggcacgattgacgggctcattggctgtgggattgatctcagtctccagtaccccctgccctggaggttgggcaatagcagttggctccaagcccagccctctcatcacaggattggtctttgtgatatgcacagcccccatcctgagtcatctgttagcatcagctgctagggacccactatgttatattatgtccctgataatttatgttagtgtaaaccatcagggaccacacttctattacttggagcattccaaggatttagaagaaccagggataaaacccagccaaattctttattatatgacttccttcccctccactccttactcttcatttctctggccctgtttactttgaccacccagccccttgtcaccatgcctgtagagctttgcagaagacaagtcaggggagctggtgtattagtccattttcacactgctgataaagacatacctgagactgggcagtgtacaaaagaaagaggtttaatggacagttccatgtggctggggaggcctcacaatcctggcagaagggaaagacacatctcacatggtggcagacaagagaacttgtgtagggaaactccactttataaaaccagcagatctcgtgagacctattcactatcatgggaatagcatgggaaagaactgcctccatgattcagttgcctcccaccgaggccctctcacaacacgggggaactgtgggagctacaattcaagatgagatttgatggccaggcgcaatggctcacacctgtagtcccagcactttgggaggccgaggtgggtggatcacttgaggtcaggagtttgagaccagcctttccaacataacatggtgaaaccccatctctactaaaaatacaaaacaaattagctgggcatggtggcaggtacctgcctgtaatcccagctacttgggaggctgaggcaggagaatcacttgaacctgggaggtggaggttgcagtgagctgagatggcaccattgcattccagcctgggcgaaactccgtctcaaaaaaaaaaaaaaaagatgagatttgagtggagacagagcgaaactccatctcaaaaaaaaaaaaaagagatttgagtagggacacaaccaaaccatatcagctggtaatgcagtgcacagaaacaggagagagcccaggggccaatgctacccaggcacctcaccaaagggataatgccccatttactaatgggggaagatggcctggctggctcccgagagcctgtcgcttgttggtgcgagggctctgaactctgctgtctggactagtctcagccctgtcacatgcaaactgcgtgccccaggacagctacatgtctgccatatgcctgagttttcccatccttagggaatggtgataacagcactgtatgagtttgctgaggctgccataacaaattcctacatacttggtggtttaagacaatagacatttattctcttaagttcaggaggccagaaggtaaaaaatccaggctgtgttcccttggtatggtggggacaatattccttgcctcttccagcttctggtggctgccggccgtccttagtgtccttggcttgtggctgcatcacttgagtctctacctgtgtttacatctccttctcttctcttctgtctgtcccaggtctcccccgcctctttcttggaaggacacttgccattggatttaggacccacttggataatccaggatgatgtcttcactccaacatcctcagtttaattccatgtgcaaatacccttttcccaaataacattcaattctttaccaggaaaggtaatactcacaggtactgggggtcaggacttgggcatatctttttggggccaccattaaacccccttcaggagcctacttcacaggattgtgaggattgcgttaaaatgcttgaaccagtgcctggcacacactaagtgctgttagtgctggcgactgggggggacagatacagcccgaccttttgtgtaatcttggccccttatttccccccattttagtctttcccccttcacagttatctaagtctgccttgggtaagcatatttaattttcatgctaagacatattttcaatctgtacggaagccatgcacttgcctctccttcagagctgggattttttttcattttgctggctgtgagcacacacacgcccacaggtgcctaagcctcttgtatgtgtgttttgaactgtgtcctctgagttctgtgtctgggtgcatgctctcctcttagcgtgggtctccttcccctgtgtagcacttcacaatgttaggcatttgtctgtgatagcagctgttcagtaatttcctacttgcccaaattcctggactcaagcagtcctcgagcctcagcctcccaaagtgttgggattacaggcatgagccactgtacctggctaatttcatgttttaccttgttaaccttttatttttatacttttaatctttttttttttcttattgtgtcatgcttttaaaccagtactctagagttttaatcattgtctttgaaatactttaacatctggtagtgtcttttaactttttattttgaaataattcaacctgacagaaaagttgcaagagtggtgcatacataccactcctgtatatccttcatccagattccctcctgttagcttctaccatagttgtcaatgtctctttctctgtttatattattcctttgttatctgaactacttgaaagtggattgtagtctggatgtggttgttcccacctgtaatcttagcactttgggaggctgaggtgagtggatcacctgaggtcaggagttcgagaccagcctggccaacatggcaaaaccccatctctgctaaaaatacaaaaattagtcaggtgtggtggtgcacacctgtagtcccagctactcaggaggctgaggcaggagaatcgcttgaacccaggaagcggaagttgcagtgagctgagatcacaccacttcactccagtttgagagaaagagcaaaactctgtctcaaaaaaaaaaaaaaaaaaaaaagtggattgtagatctgaggccccttatacctaaattttagtgcatgtttcttaaataaaaaggcactttccatcatagttatagaacacccaacaaaattcagaaatttatcttcaaactccataaccagtttccctatattaattttttgggcccaggatcctataatgtatttagcgctcatatttctttagtatccttcagcctcgaacacttctgcagtcttttattgtctctcatgtccttgatagtttgaaaaatattcaggtcatcacattctagaatattcttcaaagacacaaaaaaatgtgatgtgacttcatagcagaaataccataaaaataaatacagtatcctcagtgcattgtatccggaggcacacagtggtgatggtaactgttatcactctgttaaggtcttgtctgccacgtttccctgttctaaagttgattatgcaatactttatgcttttaggtaagtgttttatggggagataattggaggctatgaaaatatcttgcttctcatgaaacttttacccactgattttagcaaccgtggatggcttttcaataactgaatcacttattactgtggaagttgccaaatgatgatttttttttttctgattctattgttaattctgttcttaattggttggcattctacagtaagaaatattctgttttccccatttattcactcatttatttatagcactatggacttatgaataattttatttattagatttgaatccattacacttatgatttattttggtgctcagattgtcccaggtttggccagtgggagctcctgggtcctttggacatgttgtcgggattctttgaacatttcattacttttgtggcacaaaaagatagttcagacatgtcttgtacttcttctgccccgatcttggattcagccatttctcaaaagagcctctgcattaaaaagaaaagttacatattctttttcataagtggatactatatttagaaagagtgctgggtactatgcattttttttttttcttttttgagacagagtctctgttacccaggctgaagtacagtggcacgatctcggctcactgtaacctctgcttcctgggttcaagtgattctcctgcctcagtctcacaagtagctaggattacaggtgcatgccaccatgctgggctaatttttgtatttttagtagagacggggtttcaccatgttggccaggctggtcttgaactcctgacctcaggtgattcacccaccttggcctcccaaagtgttgggattacaggcgtgagccactgtgcccggcctaggcatatttattgttatgggatctcattgcttctaggaactctaagcggacaaagctagaatgtatttgcatacacagatcaacacatattatttatatatttgtgtgtatgtgtatatatatacacacacatatacatatacagttggttcttgttactagtggagctctataaagtctccacaaacacaggactagtgaatactgaaccattgcttccaggcgaaatacagggttaggttcctatgcgcctttggtcacatttttgtcagccatttaatatataaccttgttttatgcatgtgtctgcttagagacaccttttttaatatataattaatcattaaccttgaattaacagccagcagcactatagttcatgcctgaaggaagcttctgtaacacacgtttttttctgtagggcacattacacccgccttgcgctttgatgcactagactgcacttgagcatgatgcttggggccactttagacagcgaagtcacccacaaaagtccccaaaatgtgaagaacatggtactgaacagcccacaagaaggacagttgtttctactctaagagcgggaataagaaggcagagtgtcagctgggcgtggtagctcacacctgtaaatccagcactttgggaggccaaggtggctggattgcttgaggtcagcagttcgagaccagcctggccaacatggtgaaacctcgtctctactaaaaatacaaaaaaattagccgggcatggtggcgtgtgcctgtaatcccagctactcaggaggctgaagcaggagaatcgcttgaacccaggaagcggaggttgtggtgagccgagatcgcaccacagcactccagcctgggcaacagagtgagactccgtcttgggaaaaaaaaaaaaaaaagtctaagtgtcatttcgtttgacttcagctgggagcatgcatgttgggtgactcaaatattttgctactctgtgcatgtccgtgaaggactgcaagacacctggaggactgatttttggggttacaatttagcaagtaggcaaactcacaaatacaggatttgtcactaaagaggatcagtgtatattgatttctctatctttatttaggtatctatttatatagatctgtattaggaaacaaattagatagacttcacaccagtgcttcaaatcacagttcaaaaatctcatgctttgttctggttctccctctttccatatttgtatcttcatccttcagtagtgagaaacttgactcctgctgtcctcaacacgttgacttctttgctcagtcctcttgtttgtcaccagggccccagccacgtgggccatctccttgcagagagtgttcctgggacctggtgtgcggggccccagggctgtgctcccaggctgctgcttgtgaacttgctgagagctgccccccaggcatgttgccctaggctggcctcccaacctagtggatacttttgatcattgttcactgtaacctcaagcccctgggctcaagcattcctcctacctcagcctccagagtggctaggactacaggtgtgtgccactgtgcccagccaattaaatttttttttttttgtgtggagagaaggtctcactatgttgcccaggctggtctcgaacatttgggctcaagagatccccctgcctcagcctcccaaagcgctggtattataggcatgagccaccatgcctggcttgaagttaatttcttattaacgttttcagtatcattagaatatagtaatgcagtagatttttgactgtttattggtattgtacatcttgcacctctaatgtgctagcttactgtcttcagtcaatgtaggattggagttctaattgtgtaaaactctgtatataaggtttattacttttttttgtgtttttttcttcttcaatagccatgtcaccattaatactagtaaatggataagccattcctttctaatatcttgttttaatgacaatgaatttaagatatgttttgtggataagaagagctgctcatagatacagctttttatgttactgctatgctagttctaggtaatttcttttttttgatagggagtcttgctctgtcgcccagggtggagttgcagtggtgtgattttggctcactgcaacatctgcctcttgggttcaagtgattcttccgccttagcttcctgagtagctgggattacaggcacgcaccaccacgcccagctaatttttgtatttttagtagagacggggtttcgctattttggtcaaggctggtcttgaactcttgacctcaggtgatttgcccacctcggcctcccaaagtgctgggattacaggcgtgagccactgggcctgggaattctaggtaatttcagagtaaaaaatttgatttagagttgcttcttccttttctatgaaataggacatttacaaaattgtttttgaaaagatgacttgggttgcgatgtttttcttgttttgagatcctagagtaaatgagaaataggatgtggaattttaaactgacttcttgtgcatctgcttatttttgtggtagagtcacagagttacgaccaagcaggggaggtgagaattgtgcagactggggatattgggagggtgaagggatctagtttgcttgaataaaaggatgcaagtcactgtattggtgaagtttctttcaaatccaattcctgactgatttccttgccttccacagttcatcatatacaaagtagcttaaaaacattcacaatttccctgttatctttaggataaagtccaactttctgagtttagaacacaagacctttgattaccccattatcaccccagaccccatgcagcattttctctgctgtctccaagcaataagtcttggctgtgtggctccatttttctggaaaatttgtcccttcttcctcctttgtcttcttggtaaactccaaattcttttcctaaagtttgctcaaactgtgtccctttctccaaaccctctccaacttcccaggtacctgactataccctctttcttctctctaccgtacagatggttcccagacctggctgataaccaggatgtgctgggtgaggggagctttttaaggaccgccacttgggtttcatcttggcttgttctgattcagtcatttaggttgcggttctaggtgtctgtgggtttttgttttaaaattccccaggcataattgggtaacatattgaagtttaccgaaaaacaaaacaagaaactccccagtaaaactccccaggctgaggtagggattttgctaatgagccagggttgggttgggagtattggcgtatatgtcagacaagtgcttcccatttggtgtgtcaaagcaagctgtatggcacgttctcaaacctgaacctgcatccgcatcacctggagaacatcagaagatacagattgcagggccccactctcagagttcctgattcatagacctggagtgggtcctgagaatttgcatttctaactcttcaggggattctggtgctgctggtccagagatcacactttgagaaactctgctgtacagaagatgagtctcgtgagctgggatgttgatcccttagaaagcccagaagtagagtctgtgcatagcctgtgtccacatgtgtcccatcttttttttttttttttccccacactacacagatgtaacatgtcccatcttactgtaattctttgttaacatagatgccttgaactcttggagtggaattgaaccggtggatttactaatgggtttatatcatttgctaacgtggctaaaagactgctgtcattgtcttgcaacttctgtctgaggtcaacatttgatttaagattctatagcctgtccagaaaggctgtaaaaaactttagtgcggtggttctgatccatgtgattttgccaccctggcaatgcctcagataattttagttgtcaggacttgggatggggatgctgttggcttcttgagggtggggttcagggatgctgttaaccatcctacagtgcacgggacgacacccccaacaaagagtttttcagctccaaatgccagtagtgctgaggctgagaaaccttgccttaggggaaggcgtttctttttttcttccttttttttttttttgagacggagtttcactcttgttgcccaggctggagtacaatggcgtgatctcagctcaccgcaacctccacttccctggttcaagcgattctcctgcttcagcctcctgagtagctgggattacaggcatgtgccaccacgcctggctaaatttttagtagagataggatttctccatgttcgtcaggctggtctcaaactcctgacctcaggtgatccacctgcctcagcctcctaaagtgccgggattacaggcgtgagccaccatgcccagccgggggaaggcatttctaatgaggtagagtgggttttcctgtgagatctgtcattgtgtctccctgcacccagctcctgctctccagagtccctgactctgagcagcctacctccttctccaccctgccccaatgtagcccccaggccgggcccagcagcctcccgcaggcagggctggcagactcttcaaggaaaactaaccaatgattaataatttgccacacctgaaagtactttacaatgcactattctttcaataataaatgatttattgagtgaggctagagcatctgttcaatcatttactgacctcaagtgacctgcacattccccttctcctgcaggcgcttaaagagggttgctgggccccagatgtgggtgttctctgctgctgctcttcagcctgggtggagagtcactcactcgttcaccccgcagttttgagtggctcgcctggtccctggcccagtgaacaccataaaaaaatcctgccctcagagagcttttgttctagaggggaaagtgacaaagtaattaagtgcatttttttgtatctacacaaatagattgtagtaaatgggtaaagaaagtgagaatgaggatataaatgatcgacaatgagggtatgtttggttttttgtacacaagggtaggactttctggggattgagacctgcaggagagaagatctaatcatgggagaagatggggaaaagcatttgctcgcacgcaaggggacaaacgggaatgtgggagactgtcagaaacacatcaggccagggtggctggaacactgaacgaaggggacccagtcaagcacagcaccccaccatgagtttcattgtttttctactgcaggagagcagcatggcatgatatttttaagaatccactctggcttttctattgaaagatcacagggaaaccaagggtgaaggtgggtaggccagctagcaggctgttggggtcctgaaaattcatggtgccttgggccacagtgatggaggcaaaggtgtagagagaaagggttcttgttgggacaaatgggatctggttcttgttgggacaaatgcacctggaaaggcatgttggcgctcctgcaggcatgtgtgggctcacataagtgaggcttatgtgtggggcatggctgtgcgctgagttacgtgacacatgtcttaaattaaagacactcatatttatttcccagggacagataaactttgagcaatctgggaaagcatcaagataactgactaaattctatcagttgtttagccttgagaagtgtgaattacatgttcacatgcatgtaattcagcttccagagcaattctttgaccccagtgaagcacagttgacccttgaacaacaagggtttgaactgcaagagtccacttatgtgcagattttctttttttttctttttctttctttttttttttgagatgaagtctcactctgttgcccaggcaggagtgcaatggcatgatcttggctcactgcaacctctgcctcctgggttcaagcgattgtcctgtctcagcctcctgagtagctgggatgtgcaccgccatgtccggctaatttttctgtatttttatagagacagggtttcaccattgttggccaggctggtcttgaactcctgaccccaagtgatccacccgcctcggcctcccaaagtgctgggattacaggcgtgtgctgcgcccggcctacgtgcagattttcttcagcctcttccacctctgagacagcaaggccaatccctcatcttcctcttcctcttcagcctattcaatgtgaagatgatgaggatgaaaacctttgatgatccacttccatgtgtatcttctcctcaatgattttccacaatgattgtcttaatggcggtttcctttctctagcttactttattgtgagaatgtagtatataatacatagagcatacaaaatatgtgttcatcaactttatgttactggtaaggcttccagccaacagtaggctattactagttaaggttttggggagtcaaaaattaatatgtggttttttggttgcacagggggttggcaccccaatccctgcattgttcaaggatcaattgtatattattctctgtgcttcttggtgcgcaaacttaaatgagtagcttcagatgctcgctttgttaaggagtcttattccttagtctggcaagtgcttatttgagcttggaagcaagagagaactatgtcatctcttatgagagatgaagtttaatcgtttggaagaaagcgcttgatttgaacaggcactaattaatgtccagattttttttttgatttttcttttttctttttttttgagacagggtctcactctgtcacccaggctggagggcaatgagacgatcacgtctcactgcagccttgacttcccaggctcaggtgattctcccacctcagtctcctgagtagctgggactacaggtgcctgccaccacacctggccagttttttgtatgtttttgtcgagacagggttttgccatgttgtccaggctggtgtcaaactactgggctcaagcaatcttcctgcctcagactcccaaggtgttgggattacaggcgtgagccacagtccccggccaatggcctgattttcagaggatagtcaacatcatacactgatgggctcagaaggatcttggcaacaatgagccctgcatctagcaggtggccacacgggccttgctgactatatagtatggcatctctggctagtcgtcagatccttcacttgctagttgcaatgaacaatgctttcatctccttatgagtcagccgcataacttgggctgcagaaataattaatatcctactcacttagccgggcatgatggcatgcacctccagtctcagctatgcgagagggttgcttgagcccaggagtttcaatgagctatgattatgccgctgcaccccagcctgagtgacaaagtgagaacctgtctcttaaaaaaaaatcttactcacatttcttcattttattctgttactaaattgtgtacaaatatgccaagtgcatctttttttaaggaagaagactaagatggctaatcatgcacaatggctgtagatgcttggtactggttgtcgtgtgggaaagtgctgggaagatgggattataaagtgagggccctgtgaagaagtgaaaggcatggattagctggtgggagaacagggagacaagaaggctgtggatgaaccagagaaggctttgaagctccgtagtaggaaatctctgaggtgcctatggcatggaaggacccatgttgaacccagagtgcaggtgtggaggggggttgggggacccggaagagaggtggacagggtccacattgcctgttgcttaggttgacatagaaacaacaggtagtagagtgaagcgggaagggatgagaaaatgggctttgagcgtgttttaggaagggaggaacgttagaggaaaaataacagaagatcacagctttacaggtgccacctgagtttaatttacttggtcatgggccgagataagctgggttgggaccatgttgagaacacctgtggtgtgggtgctctaccctcacgcgagatccattccagcgatgcctgtgtctggtgatcgttgaactttagtgtctggtgatcgttgaactttagggcatggagaatggctattttggactacagagaatgggaggagattgaagaaatcaggtgtgtcgggctccccttggagccaggccatgggaaactttgtaaggacagaggccctggtgaactttggaaggattttgttttcttttaggcattcaggttttggggtctgagcagaattgctggagtgttacacgagaagtgtgctggcggtgggctacaccattccttcctccccagcactcagtcacttacctacgagaaaatgcacatttgcactggtgtgtgtccttgcaccctctttctgaaacccatttgcagaatccaggcctttaggaaacttttgctattgcagacttacttatatctgtaaattatttaatatttatatttgtaactgagaagttgatatcatggactcgtaatggattttggagtttaaatatgttaaaataggtaatttttacaggatgtgttcattcacgtgacaaatctgggtgacttctatgtgcccagcatgttgtaggtgtgggtggcttagcagcaaacaacacagaaaaaccccatccttgtggagcctagatgcctccaggggaaaacatgatttcaaaaaagtgaaatataatagcccttctaatgttgacaggtgctgagtagaaaatttaagcttgggcaggggcagagggtgagccttatagggtcaatgtgactgtttctggatatactttgcatgttgaagtaataggacttggatggcttagatgtgtcctatcaaagagtgacaaagaagggatgggctgcagagtcacctgaaggttttcttttctttggaaaatctgggcaaggggaaagatgtgacggctgataactgagagggagaagcctgggaggagcaggatttttttgtgggatgaaaaggtgttctgtttggacattatttagtttgatatgcttatcagacacccaagaggaggaggtgttgaatcagcagttggttatgagtcaggggtattgtatgtgcccttaggcactagcaatgttttttgtgtttttttttaagcaaaattatgaccatcatttcagaaaactattttatatatataaagaggttgaaagcttattaagactagatttagaaaaaacatataatactctgagaaattctgtgtgtagtgtcaggtagaaagtaaagtgttaccagttctgtttataaaaccccctttaggccaggcgcagtggctcatgcctataatcccaacactttgggaggccaaggtggggggattacttgaggccaggagtttgagaccagcctgggcaatataatgagactctatctttacaaaaatatacttaaaaaaatagccgggcatggtagcacgtgccttgttatcccagctacttgggaggttgaggtgagaggaccgcttgggcctgggaggttgaggctgtagtgaggtatgattgcgccactgcactccagcctgggtaagagagtgagaccctgtctcaaaaaaaagagaaaaatccactttatacaaaaatttgcatgagagtattgcccacatttgaaggaacacttaaccttccatgtattatgtttatatggagacttgtctctgaagatggattttggagtttatattaaatttgtttttgtttctgtgttgttttttttttgatggggtctcgctctgtcgcccaggctggagtgcagtgtgcagtctcggctcactgcaacctctgcctcctgggtttaagcgattctcctacctcagcctcccgagtagctgggattacgggtgtcctccaccacgcccggctaatttttgtatttttagtagaggcggggtttcatcatgctggccaggctggtctcgaactcctgacctcaagtaatccacctgtctcggcctcccaaagtgctgggattacaggcatgagccatcatgccaggccaaatttggggatttttggaggatgtgctcattcatgtgacaaatctaggtgccttctatgtgcccagcatgttgttggcttagcagcaaacaacacagaaaaacccagatgctctggggggaaaacatgatttttaaaaaaagtgaaatgcaatagcctttcaaatggcgacagatgctacagagaaaatttaagcgtaggtaaaggcagagggtgagccccatgggagggtcagtgtgcaaaatggaaactcagcatcatttcttcaatggagctgttttggagaaagcccggggcagtcatggttggccgtgcactaacctttctatcgtggaggcgtggggaggggagaggcattctcaggtgttttccttagaaacacaggaaggtgaggaagaacagtggaaactgaatgaggaataaaaggcattcagatttaaagataccaagattagaagttcagagtctagggtggtcaccagacagcagatactgtttaaaataagtgttgaattcctggcaccagaattctagtcctttactattttgtggcttccaaatagagaaagttcatggaaggaaacataaaggtcatctagttaaagtcctgtgtatctatttcactctctttatagatgtacagtagtccccccagtccgaggaggcaggggaactaccctcattgaagaccctcacctcagtggctgcctaaagccgtggatagtgctgaaccctactgattttttttcctacttacacatatctttgttggtttgtttgttttgtttttgagacagtctcgctctgtcacctaggctggagtgcaaaggtgcgatctcagctcactgcaacttctgcctcccagtttcaagcaattctcctgcctcagcctcccaaatagctgggatcacaggtgcctgccaccacgcctgggtaatttttgtattttagtagagatgggttttcaccatgctggccagtctggttttgaactgctgacctcaggcaatccacctgcctcggcctcccaaagtgctaggattacaggtgtgagccaccacacctggccctacttacacatatctatggtaaagtttaatattataaattgagcacagtaagagattaacaatgataataaaatagaataattacaacaatatactcttcaccatttcgttgatagaaggttcactcttaaaccagatctcagcaacctcagcatacaatttttttttccttttcttattggcttgagaaccttaaccttttcacataaaggaaggcctttgtggcttctccttggcatatccaaatggctagcatccttgtacttgctctttgggggccattattaagtaaaataagggtgacttgaacaccagtattgtgatgccatgacaatagatctgagcgcccagggtggctactaaatgactaaaggtgggtgacgtctgtagcatggaaatgctggacagagggaggattcccatcctgggtgggtttgtgggagatttcatcatgctactcagaatagtatgcaatttaagccataggaattatttctggaatttcccatttaatcttttcagtcaactgtgggtaactcaacctgtggaaagcgaaactgtggatatggggggatgactgtatagcatcgagagacacaagtgaactccttcagtagcctgccacaggggatttcattcaacctgcccttagccttccttgttctctaaactctcagcttagctcacagctttgctgtctgcaggtctgagcacaaacctgccttctcgcttacctcctggatcccgtgattccaggcctaagttcaggaggtatacagcagagaggaccttccctccctagtctcttcttttagtattgtttatttctaataaagttgggggaaacttttcttctttgatagactataattttagggttatgcaaatgcataatccattgaaaaaggttttattaggcttggcttctgaagaatataaaattttgaacttgtccattaaagagagaacaatcttgattcaatgagtatcaagtaatgaaataattattttagttccatcatggccagttgttacagaaaggtcaggaaagaggaggagaagagaaatagaaagggcctttaaggaggcagagagggctaaaagagagctgaaaggggacaaaaggagagagggaaagagaaagtgaggggatttaccaaagataagttagcttttatttcctcctttacttgtggctatggggaacatgaagctcatagaaactgaagactcaggtcagggtcacagagacagggagctgggacctgtgttttccctcttataccacattaagaaaccactattggccaagcttggtggctcatgcctgtaatcccagaattttgggaggccaaagtgggaggatcacttgagcccaggagttcgataccagcctgggcaacatagagagacctggtctctatcaaaaataaaaatattagccaggcacagtggcatgtgcctgtactcctagctacttgggaggtagaggtgggaggattgcttgaattcagaagtttgagactgctgagctctgatcggatctgagtgagctctgatcgctccactgtactccatccagcctgggcaacagagtgagactccatctcaaaaaaaaaaaaaaaaaaaaaaaaagaaaccagtattcagaacttctcaaatccttgggggaaaaaacaacaaaaactaaatgccaccaccaccaacaataaataacaaaactctctactaacccttgtctaagactcctgcttgctggaaatgatgctgggggttgtgatcctggggtggagaatgtctctgtattgctgaagctgatggcttcctgtgttgggcattgagcacgactatgctatattgagtttgtattgaattttaccctagatcattgctcaaggtactctacccatctgtcttattcaataatacaatcattcattctttccataactgtttattgagtatctatcacataccaggcataatggggattccaaataatatggcagtagtcattgccctgaaagcattgtactcctagtaggacagttaggagggaagcgatgctgctgtactaagtattgtgggagataagggggagaagagactaagtctgaggagagaagggctactggggcagaactgggtggaggaatggctcatttggcagtggtctggaattgttgactagaccccctcagggacacattggtattaaggagccaactgacttagatttccatgtataaagtccttacatagatggtcaaagataatttagtctcttgtcaaagttgacttttgtcatcaggcaaaagcctttagctcttgctggtacccacatcttttcagcccagctttttgagatctgggcaatgagagagagtaggagggtccttgttaagtccttactgatttgtgtcatcctctaatagaagctttgggtctcttctgattgcagatactttaactcaacagtggcatccctccttgttaatatttctaaatgttatgcagttaactgttcagcctgtggaacagagttaccattctcactttccttaattttttaacttcctggagccagttttattccctgattaaaaaaacctctttagtccaaaaagacaccagtgaattttacttagaagtccttgctgaaatatactgtatgaggttctgctggaagggaggtctcgggcatgcagaggtcatctcaggcatgtctgggaaacccacctaagttgaagctggactggttaggttacagtcttctggacacattttggaggaggtgaggagaaagaggtgagttgatgagttcttcttgccattgggttaattagaattgctagtttggatcagcaggaggtttccggaatcctgaacataacttggatacccctgcagtgtgtgctccaatcttacggggcattgaaagcccaccatttcactgcaggcagaagccaccaggcagtgggttccccatgggaagggcttcctagattagacaatccccatgttaaaataaaacatgcctattaaaggtgacacatggccagataagacagccaagatgaaagaagtttgtgtaattgagtaattgcatctatcaaagttattagaggtttccttatagggcacaaatatgtttcttcttcttttttttttttttagacaaagccttgctgttctgctcaggctggtgtgcagtggcgatcacagctcactgcagccttgacctcctgagctcagtccatcctcccacctcagcctctggaatagctgggatcacaggcttacaccagtacatctggctaaattttaattattatttatattttttattgttttgagatagtctcactctgttgcccagactggagtgcagtggcatcgatctcagctcactgcaacctctgcctcccaggctcaagtgattcttgtgccgcagcttcccgagtagctgggattacaggcatgtgtcatcacacctcgctaatttttatattttcttactagagatggggttttgccgggctggtctcgagcttctggcctcaagtgatccgcctacctcagccacctaaagtgctggggttacaggcatgagccactgcccagcctttttctttataagtttttagtagaagtgggcatctcactatgttgtgtaggctggtctcaaactcctgggctcaagccattctccctcctcagcctcccaaagctctggagttacaggtgtgagccactatgcctggtgcatgttaattattatcatttaatgattaatgatgttaattattatcatttaatgattaataatgttaatatcatttaagtgattcctaatggatgaccattttgatttttctttttttttagtaaaaagaatctcaaaatatttgaataagttctttctgtcctctgcaagattactattttgtcctttcgtaactaataaataatttgtacctagataattttggattatgtaaatgtcccatcaaaccttcactgactggttttagctcccattgaaaatgttttctaacctcatcattctttatctgagagtttttccttcttaccccatttatgtctcagtaaggattcgtggattcttttgttattcagtgggttagaattcattgctgtcatgatttatttggatgcttccattatcacagacttgtctagtgggaccccgtcaagctgggtcctctgttctttgggcccatcctcttgattccttgaatgtttccttatcgtatggtatctcatgggccatctttttctgccccagcctttgaatcagctatttcttcaggaagctctggttccttttagataataatggttttggaaaccaagatctgggcaccagcatgctctcagctactggtgtgtcattgcttctggggcctgtctgtggatagagctagggactgtgtgtgtgtgtgtgtgtgtgcacatgttaacttttctctctctagctctatatattcatatctgtctgtctatatatagctgtatgtattttaaaggtaagtttaagcaaaacccatggaggtaggagtctacttaaacacggatgtgtaattctggatatatgtctcttttctcttgttaacaggtggctcaatcccttgtttaaaattggccataaacggagattagaggaagatgatatgtattcagtgctgccagaagaccgctcacagcaccttggagaggagttgcaagggtaagtcggaggcagtaaagtgggcattaaggaagcgtgggtgtctgtgtgtggggagtgggttttgccttcctgggtcctgtctggagcctccgtttacccttaaggtgaatatgtgtcaccttcctcaggctgcccctaggctcagcctaccatggtggcctgggggaaactcctgttgcctgtgcctccgtagaggtcaggggagccagcaccaaaggcccgagatgcctgaggtctgtccctctaggtggaagtgttgtggttggaggaggttgtctggcttatctgtgctactgatggggcttcaatccagtaaagcttggcagtaacttgtttccccagacttcccctcaaggcctgtttttctgatgctccagattctgtaccacacataaccttcaggagccctgggagcaattagtagcatttatgaaatcgtcacaaaatgccctgtcttaaatgcatacctgtcactctgccatctcccctgttttatattgtggcagggttcactcttatttacgaagctttttcctcattgtaggttctgggataaagaagttttaagagctgagaatgacgcacagaagccttctttaacaagagcaatcataaagtgttactggaaatcttatttagttttgggaatttttacgttaattgaggtaaaagcttttacataccatgaattgtttttcaggacacatagagtaaatgtgctcgccattgactggtgctgtaatggatgggggaacagaagggagaagtggccagatggggtttgaaggtattttaaggtctaaggattaaacatgtctaggaagtattaggtagttagttcagtgagcgtatttatccaggtgaatacttaagtgactgaagttcaaggtcattattgtttttcttgtaaccaattaaaatgcagtgtcatggaagaagagtattttattctatggtaggacaatgttggtgctcggtaaatgttttaaatgctaagagtcactcctggtcaaaagaggatcctacagccttgaggagtgcgtgccctgtggtttagaggaagtgattttggatcggagcccagaataatgtaagacattttacaggtgctcaacaaataattgttcaccaagccaaatctgataattgctcttctggagaggtattgtcacctctcccctctcggggaaacagagctgagggccttgcacctgggctggcggtggtgccccagaggctggagctggctgaagcacccaagagctaccccctcccagtgggcccaggtgctgggagccaaaatcccctctgggaagaaggtccgaggactgtgcacccaaggggattcatcacacccatccggtgtgtcttccttgttgtcggagtggattgctggttggaaggtagagtcttggtgcctggccctgcagagaatgtataaatggacattccatgaaaaatcaaagacagccagaagggcaataacctctgttaccccgaagggcctctcttgagatctgcagaaagacagtgttctgcctaggcacactgccaggtagcttgtccgttctggtctttggcctgctagaggagatgcagagggtcctgctgggtgacttgtgtcctctgtgctaccttagggatgtcagtggtccattaaagttagaggggtggatgttgctgttgttacaaaagggtggctttaaatgcaggatggggagttgtcacggtgcattttgttgggaatgaggtgggtggggggagggggttggtttgtatgtgggggggtttgctcctgttgaacatgctttttgttgtggagggcacggtgggcagtgggaggcaggtaggtgagctctgccctacaccagaggaatctgtcagacaacaggggactggacggtcctgggagatgaatggtctcattggtgacaaaggtgttttggccagggtgccagatggtgaatgccacctttgagagggtacccgccctgcctgcatgctactgtggctttgtggcagatggggtggacatgcagaataaccggtggaactgacttgagggtggaagagggctaggagcccctcaggttctcccagcccctcttcaacctgtgctggggtgtcccagcgatagtgtttccacatggccccgatcagtttcagttggaaagaaatagaatgacaagtcggtgtcaatgtggccagtgtgtgcaggatttcctggcccagtttggctgtgcaacctcagagaagttgtctggtagccatggagcctctgtaagtgtctaaggctcatgccaggtgtctggttaggtgtagtgggaatcaatggcctcacataggtttcgaggcatgcctccctcagctacttccatttctctagtttccctttgtcaccagctgcttatgaaattgaaaacaggatgatttagaaggaactgagcttgtcatgctcagggctgtccatgctgtcatgggctgccagccacttggggtggggtctctaacccacagatggtgactggactacagtgagatttgggtaagcttttgggagaagcaggcacagaagtagaggctgtagaagcgtgaatttctcctgagacttgaggacaggccccactctggtgcaaggagcatggtaatctttactgctggtgggcatgtgggaaggggcccggatcgaggggagctttaatatgggtacagttggtggagagctggtcttttagcggggtggttattgggcagtcatggcagaaaagtagggagtggaggacctggcaaatatgggggctcatgctcagtactgcttagcagcagcagtgctagtagaagcagcagcaggattagtagtggttggtactcagtagtagtagtagcagcagcagtgatagtagcaatagttgtaataatactgacagtgagtacttgaaaaatactatgtaccaggaactgctatgatttctttctttctttctttctttctttctttctttctttctttctttctttctttctttctttctttctttctttcatgttattttattttattttgttttttgagatagggtctcactctgttgccaggctggagtgcagtggtgctatcttggctcactgcagctttggcctactgggctcaagcagtcctcccaagtagctaggaccacaggtgcacgccaccatgcctggttaatttttgtatttttgtttcactatgttgcccaggttggtcttgaactcctgggctcaaatgatcctcccaccttggcctctcaaagtgctgggattataggcaggaatcaccatgctcagtcagaaggcattcttttaaccctacttttgggaagaggacactgggtgccatgtagttatataatgtgcctagggccacacaaagtgtaaatgacagagcccagattcagtctcaggagcgctgacttagggacctaaccatctccagactgtcgtaaaggtgtcttgagaactctgtcttcagagtatccagcacatgcttcttgaacttggcctagggataagtcagatgctaagagctccctggaacagtggggcatggctgtgggaaatcagattggggattataaattaccctaggttcctaggtgtcctggtgccggaaagtcaggtgacatgctagagagtggctggggtgctgggcaggtcagagcaccaaggtacattcaggttgaccacgaactctttttttttttttatgttttcgtctgaggtggggtctcactctgtcactcaggctggagtgcagtggtgtgatctcagctcactgcaacctccatctccctgggctcaagcaatcctcccacctcagcctcctgagtagctgtgactataggcatgcaccatgcctggcttattttttgtatttttagtagagatgaggttttaccatgttgtccgggccggtctagaactcctgagctcaagccatcggcccacctcgccctcccaaattaatgggattacaggtgtgagccactgtgcctggctgaccaagaaccctttagaaacctgtctcccactgagtaccatcctccacatgtgtgaggcgtgcagccctgctgacccaagttcatcaacatccacgctgttaagacaccattcccagttgtctcctcctcggatggacgagggggaagcttgtggtcttgcatggtcacgacattgactgatggtctgggcggatgtcaagttccctgtttttacttatcaaaggctctgggtttcttgcatagcaatgatatctctgcagtttcagaagcctttggcctgaatcgtgaagtgggtgtgcagtttgcttggcaaggatgaagaccccagatgagtcactagtatggggacagctcttctgtcctggtatctgaaccctcccactagcaaggtgggccccaggtattagggcggcaggctaaggtgttaagatggacccacacagtgctggcggcaggcacctctcatataaagtggagcctgggcttttcacaagagagcacttgttggtcctgtgtttacaccaatatcttggtggtttatggtataaaattagacagtagtcagttattctttagaggatcatggtgactagtggatgatgctcattttaaccttgtgtctttaacataataactggtagaacttttagttccgatgcagtgaagttcagggagctaaagctcttcccagttcaactcaaagtaatccttggatttttttttttcttttccttctagcagtgaaaacagcctgaattctagtataaatactattgttttcccagccttgcctattgacacttggctgttttggagaagttggagagaaataatttcttaagatgaaggtagtgagtgtaacatctcaaaagcatttcaggtgttgttttgggttttcaatcattaaagctatttattggccaggcatggtggcttatgcctataatcccagcattttgggatgccaagggatgattatttgagcccaggagttcccagctttagtgagctatgattgcaccactgcactccagcatgggtgacagagcaagaccttgtctctaaaaaagaaaattaggccaggcgcagtggctcacgcctgtaatcccagcactttgggaggccaaggcgggcggatcacaaggtcaggagttcgagaccagcctgaccaacctggtgaaaccccatctctattaaaaatataaaaattagctgggcatggtggtgggcgcctgtaatcccagctactcaggaggctgaggcaggagaattgcttgaacctgggaggtggaggttgcagtgagctgagatcacgccactgcacttcagcctgggtgacagagcaagactctgtctcaaaaaaaaaaattatggagttagaacaaatgttagtttcacagttgatttaatgaagatgcttttcattttttggtcttgtgtctgtgctgcttgtggatcttcgtattttggatagtggaagctctaaacttaacctagcatttagtaaaaagcttctgtgatgactttcaggccttttttaacccacttatgccggaggttgccaattttttttgtgtgtgaaagatcagaccttggcgatgaggttgaacagtagaatataaactcccacaagcttagtgttccaataatggaatgctaggcacagatgggttaattcctctggttacagaacaactgtgcagtggatccataactccctagccatatactcttaactaagctgaaggcaagcagggccttccctgggtactaatgatggcaccagcaggaagagagatggtgacaccagtttgcggggagtctttgaggttggaatttcaaagtaatgcaagtgagattaggaacgattgtcagagttgaggaatgattataatgcccagagaaacaagtactagtctaatggtgaacatggtgctcttccaggcaaatgctaattagaacagaacagcccgcaaatttccagcacatctgtcccctatgtgcacctccatggagactgtgatggggactggagactgagcaagtatccacccacttagagcctgcagggggggcaggaggaaggaggagcttgggaatcctctgtgtgggccaaaccaggacacaggcagcttctccatttgtatctatgctgcttgttggtctttgtattttagatagttgaagattatctaaatgtttctttgagaaatgagatgtgtatttttttttttttcctgagatggagtctcattctgtcaccaggctggagtgcagtggcacgatctcggctcactgcaacctctgcctcccaggttcaagtgattctgctgcctctgcctcctgagtagctgggactacaggtgtgcgccaccacacccagctaatttttttgtatttttagtagagatggggtttcaccatgttggccaggatggtctcgatctcttgaccttgtgattcacccaccttggcctcccagagtgctgggattacaggcatgagccatcgtgcctggccaatgaggtggtttttaataacttcaattctacatttcttgttcagctgcctgacatgagggccaaggccaagcctcatgtggtattttctttctttggttgttttgttttttgagccagagtctcactctgtcacccaggttagagtgcagtggtgtgatcttggctcactgcaacctctgtctccttggttcaagccattcttctgcctcagcctcccgaatagctgggattgcaagcttataccaccacatgtagctaatttttgtatttttagtagagacagggttttaccatgttggccagcctggtctcgaactcctgacctcaagtgattcgtctgcctcggcctcccaaaatgctgggatctttcttaggtttttaaagatcatttcaaaaatataaaatataatagaatactaagcctctctctacccctaagccagcttcagtaactatcaactcatgaccactcttgatttttatgaagccctgctcactgccccctctgaagatgtgtgtgtgtgtgtgtgtgtgtgtgtgtgtgtgtgttttgagatggagttttgctcttgcccaggctggagtgcagtggcatgatcttggttcactgcaacctctgcctcctgggttcaagtgattctcctgcctcagcctcctgagtagctgggattataggcatctgccaccatgcccgggtaattttgtatttttagtagagatggggtttcaccatgttggccaggctggtctcgaactcctgacctcaagtggtccacctgcctcagcctctcaaagtgctgagattacatcgcgcccagccgcgtgtgtactttctaattgaagaaaccgtgttgtttgccctgcacggattcccagggtctagattgggctcattgcatatccctcctcccctcttgtgaccctctacatccttgcatgctgtatcatttaacatgtccatctggtaccagaagttagtagttagatctagaagcttgatgtgattcaggttttattttcccccctcctccctttggcaagagtactttgtaggtgagggtgtgtaccacctgccacttcgagatacctcgcttaggtctggttatgtgtgtgtggtatttggagccattcatgatcattgcttaagatgcattaatttgttaggagtttgcaaagtggtgatattccagttcctcatttattagctgaaatatttgcataaagagaaactttgccattatcaactctttgatactctgagttacagtacacctataggaaaggcaggagaaatgattaattttgttatttttttttaaaaccgattttcaaaataatgagtgattctccagcattttcctgtggagttaatggattttttgttattgcttgttctgtatattttgatgagtatgattgtgagctcatggatttaaacagttctgatgtgctgttcattacagttatcatccctgtgccacgctttggctgtctttggctagtgggagtctatcgaagttgggccctgagtcttttgaatgtatactattagtctttgcaacttcctcattttctggtatgacagatgttttaggctccctgaacagtttttgccccagctgtggaatcaaccatttttcctagcagctttaactccttttatgtttatatttaaagataaacatatcatgaatttatgtgggtatttccaaatcagattcaggacaccagtgttttgacttaatctctttactcttacatctgtatctcttttctcccttcatctgttcttttttctccctagcctaatcccagctcttgatatcaacatacttattcatttattttatcttacagtatcaacactattacccataatatgatttctaaaaataatttaaattttttttttttttgcagtttacattgtccttagggtagataataatgtgcagggactatcttttcaaactatttttttttacagtcaaataaactagttaaactattttgtttaaagttaaaaaaacaaattatgattcatccttttgtttggtaggtacagtctttactgaacatttaattttccctgctgtgcagaatggaagatcttagtttcatcactgaaatctcagcatccttttttcctaagggattttcttggaagcctaacatttggcagcagttctgattaaaagccctttgtggtcttaaaagttcttcagggtcaggcacagtggctcacgcctgtaatcccagcactttgggaggccaaggcaggcagatcacgaggtcaggagttcgagaccagcctggacaatatggtgaaatcctgtctctactaaaaaaatacaaaaattagttggtcgtggtggcatgtgcctgtagtcccagctactcaggaggccaaggcaggagaattgcttgaatctgggaggtggaggttgcggtgagctgagattgcaccactgcactccagcctgcgcaacaagagtgaaactccatctcaaaaaagctcttcacagcgggtctccagcccctccagactcagacacagagagtgcaggagaggagaatagtgatgtgtacaggcattggtttctacactccagaatcttccggggatggggaactcaggccctaccctgatcaattggccctaaatgtgggggatgggtcctgagcatcagtgagcgtgtaagtctcctgggtgattctaacatgcagtcaggactgcactgattcagagaggacttcaggtatatctggagtcttaatggttattatttccccagattcaccttttttcttccttatctctggatctttctcaaccctagttttgtcccctgttcccccatttctttttttttttttttttttttctgagatggagtcttgtgctgttctccaggctggagtgcagtggcgcgatcttggctcactgcagccttacctcctgggttcaagtgattcttgtgcctcagcctccccagtagctgggattacaggtgcgagccaccatacccagctaatttttgtgtttttagtagagatggggtttcaccatgttggccaggctggtcttgacctcctgacctcaagtgatctgcccacctcggcctcccaaagtgctgggattacaggtgggagccaccgcgcctggctgtatttccccatttctaaaacaaactgcttactcatttttccacagctcactcttttctgcttgtatttttcactcaaacatcttctttggtagcttgtttctatttcctgtgttttctttccttcccatgcaatctggtatggtgcagttgggcaaggaatatctgaagtgcgtgggggagcaggagcatggaggccgcgtgcccgctgggcctagacatgtaatgtgtcactccaagaaagcaagggatggggctcgaatgtcaggaggctgagtaccaaatactccattgagaagtatctgccttcaagtactctgggactccagtagaacctgaagtatggaacattcaagtatcctactggactctcaaaaacctccatggtttcacagtcgaggagaattcttgtgaaggagtaaggactattcttagcttgtttgtggaaagactcttcaccaggtcatagattggttggtctctaaggtggagaatttatgtgagttacttttgaccttggtactgatatttagaaagtttaaatttggttagttgtaattttgataatgagtattttcccagttgtttcgtttcttattagttgaaggttaagatggagaggtccgtggaaaagcatggaccaaaaaccagcattactcaccaatgagcccatttgcttgactggattattaaatgctgtctctcggcagggaaatctggacaattaggtagtcgtgacctacctgccttttgcattctctttcgctgggtttattgcatctgttatttcctctgggggtcatccctcttgccgtttgaatcatactcacctacggctgaaatggagaagcgtgtaacaggtaacagtgactcccagggactgtgagaagtttcaggaacatttagaaaggcaaagagcactgagcgtctggctgatagcccaggtgtgtctgctgcggccctggttgcccttggcactcctgagccagggctgcccatgtgtacagtttggccgtcttgcttcttgatgtaaacgtccagattttcatctcagtaaactctaaacagtccgtgttatgacccattgtactgggggctcttccataaactcttagtgccttttgaatgattggccatgctggaaatgtaatggtgagcctctgcattcttgatatctgatcatcttattcataattcttcaactaaatggtattttctgatttctgtatcataggggaaaacttccatgacctcatggaaggcagtgcagttggtgaagtgtgtgagagagagtgtgtgtgtgtgtgtgtgcgcgcacgcgcgcgttcacatgccgagacaggcttgttgggatttaatatcatgacccatctgagggatgggaatgtcttctgtaaatatcctgatcccgtgctagttgtttgggatgaaagtgtgtgttaattttgtttttgttttttactgattgttcttctctcacttcagatggacagaaaacagctatcaatggcaaacctgtcaggtgtttattatgtctttgttaagaaggagagattgcttaaaaggaaaagttgtttttcaaggttaaggtcttgaaagattttcaaacattttgcattttgtcttttgagaagtcaggaggaaatgatgtcgagggcctacatgtttacttttggtgacctggatttgcaatgagtgtttggttttctttgttgggggaaaagggtcccttacaacgggttcgagagggaggaagtaggttgccgggtgaagtgctcatttggcagggagggtaaaggaaagctcctttgcttacctcaaaccgtggctcaagctgcgttctgctgtttctttgcctttagtcttggaggttaaaattgcattccctacatcttgttcagaaggtaagcccgcatgcttcccagctcattggtgtgggattttaattttgccttggggaaaagatgattattaatattgcttcaaaaccaggaccttcaaaatatggctgataaagagagccactgatgacattccctttgagctcaatttctgctgtgtttaatttttgactccacactacctgagccaaagtggcagttcttctgggcacatccgggcttgtagggggcagaaacatactgaagcaatgtcctgtgggtccaagagcctggaatcctcccaagtctggttcttttccccactccaactgaagctggacttggtggtgttagatctaccgactcttggagtttggattgggaaaaattggagagtttgattttctgatctgggtttgtgccaatatctccattcacaaaggctcttaactgtgaagaaggtggcaagagtgctggcctcccatagacgagcctgtgggctgggatgtcaagggtacagaggaagtggggtgagagctggggtgtctgtttgtaagcaaattccttactcctcttgggccatttttttccttattcaccttaggccaagacttaatttggtagtttgccaagtgtgctttaaagccctgtttgtaatacagagcacccacagtgtaccaagcacaatgtactaaaactttattgactttgaaattagaattttgatttcaggttaaaactcctatcggcttgtcttaaagaagaaaacagttctgcttttcttttagatgagtgatgaatgttgcactttgaaaatataaaacttgtgttaagaaaaaacgagcctaggtgccgtggctcacatctgtaatcctagcactttgggaggctgaggtgggaggatcacttgaggctaggagttcgggaccagcctgggcaacatagtgagaccctgtcttgaccaaaaaaaaaaaatttagctctacatgatggtgtgcacttgtagtcccagctacttgggaggctgaggtgtgaggattgcttgagttagggagttcgaggctgctgtgagctgggattgtgccactatactccagcatgggtgacagagcaagcaatatctgaaaaaagagaaagtaaaaagaaaaaatggtgtggtctgtatgtctaattaaaggcttttctttttcttcttttaggaaagtgccaaagtaatccagcccatatttttgggaaaaattattaattattttgaaaattatgatcccatggattctgtggctttgaacacagcgtacgcctatgccacggtgctgactttttgcacgctcattttggctatactgcatcacttatatttttatcacgttcagtgtgctgggatgaggttacgagtagccatgtgccatatgatttatcggaaggtaagtgacattcagcattaaacatgtacctcacctgaagcatcagaagcattctgaggaagttttatgtaaattaaatactgcataaatagccactgcactccagcctgggtgacagagcaagaccctgtctctaaaaaaagaaaaacgaagaaaacttctgtaaatagaatcatttacaccttactagagaagcttgctatttgcatcaggccaatgttttttttctttatgcaaaattttccagtgtataatgaaagttttctactgctgtcagggcatggctgcctttgataacaggctgttgcagaatactaaatttataatgaaatctaattaaaaatatcaaattggttttcagtgtttctttgcctcaatctcatagttgtatttatggaaatttttgttgttgttcattaaaaccttcacttacatcacagttgtattcagaagtgaacttcagtgaaattggatctatgaaattaaatctaggagaaaagaatatatttgagaaagggaattcttatattttttaaatgaaccatttagtcatattccatataattttcttaactgaagaaaaatgtaaatggaatccacgtcggatacaggctttctttatattctaaatctagttgtggttgtttttaatggtatttaagaaaatagttggatgtttgggataacactttgaattgttgattgtttttcacaattttggagagaacttatagtgtttctattttatgttggttttcattcaaagtaagtttttacattaaacagttgtcccttggtattcgtgggggattggttacaggacctcttgaggatacaaaaaaattggaggatgcttaagtccttgatataaagtggcatagtatttgtatataacttattcacaccctcccatatatggcattttatttatttatttattttaaataatttcatcttttattttagattcaggggtagaggtgcaagttttttccatgggtgtattgtgtgatgctgaggtttgggttatggatgatcccatcccccaggccatgagtgtggtacctgataggtagtttttcagcccttgccgcattccctctctcccaactctagtagtcttcagtgtctttgttctcatctttatgtccatctgtacccaatgattacctcccacttataagtgagaacatctggtatttggttttctgttcctgcgttaattcgcttaggataatggtctccagctgcatccacgtggctgcaaaggacatgattttttttttttttatgggtgcactcccatgtactttaaatcatcttggtttacttataatacctaatacaatgtaaatatacattatataatgtacaatatacaatgtacattgtgtacagttatataatgtacattgtaaagtgtacattatttaattgcacattgtaaattgtacattatataattgtacattgtataatgtaaatatacattgtattaggtactataaacaaataactgtttagggaatagtgacaagaaaaaaatctgtgtgtgttcagtacagacacaatcacctattttgtttcccccaaatattttcaaccccaggttggttgagtccagggatgccaaacccatgcacaggaaaggctgactgtattttctttcccattagggcagtaataatgataagacctgatttgatattttcttattttatttgtgcttttgtattgagatatgccataaataataccatagtttgctgtggtcttaactgttatagaaggagtgggatttctggttgctttgctgagaagttgccatagagatgctagtgtcaagagctaaagaacttgtcattaaatcagtcctggatatctctttgtcctgggccgtttttttaagccatttaaatttttttttttttttgagatgaagtcttgctctgtcgcccaggctggagtgtagtggtgcaacctctgctcactgcaacctccacctcccgggttcaagcgattcttctgcctcagcctgccgagtagctgggattatggacatgggccaccacacccagctaatttttgtatttttagtagagacgtggtgtcaccatgttggccaggctggtcttgaactcctgaccttgtgatctgcccgtctcggcctcccaaagtgctgggattacaggtgggagccaccgcacccagcccatttaaatttaaagtattcttctttgacctcgttgtcacttatccagagtgtccgtaaggtgtcctccccaagtcttcctttgacatgggggaatcaatcttataattctgtgaatcctggaggcctcgtgtcttagtgtctatggtacagtataacaggtatgcccggattcctcatgtgtgacatgaaaatgataacaaggcttgtacacactagtcaaggggtcttcatcatcatcaccaccaccaccaccaccaccaccaccatcatcatcagcagcagcagcatcatcatcatctgtgttattctcctgtactctcttctaccatttaggagaagaatactcaggtttttctataaactagctagatttttgtctttcaagatcatacttctaataaattcataaaaattttcactaacactccacttggcaaactttaaaaacaccctacatgaagtccggtttgaggtagtggttcagtaaaacacagctctttgtacaagtgagatactgttcacctgtttttcttcctcttttccactaacgctttggaaaatagcctttgggaaatctgatctaactcggcagacttgcttgcctgcatgtaaacatctcccaaaggtattaatttgtcagcttgattatcttagaagtattgtctctttatgaagtcaaaaattgcttgggttaaaccataagacttaacctgaaatcccagaaacgtgggaaagacgaatatcctcatgtcctgccttgtatgtggaaacatgcccaggtgaagaaataagacacttcctcctcacacgtgggctgcttccttggggcagaggctggctctgcagcaggactctgaaaggtccctctgcgacactggcagtttccactgaggcccccatatcctgattcccggtctggcagaaatcaggttggctgttgcaaatggaatgactgccgagcccgtcgtcgacatttggtattgaatgatcttgcaggatgtctgaaaatgactcgtcatttatttactttttcacagctttggtaaaattactttaggcttttcatcattaatttttcttcttattgtaataaaatatgcataacataaaatttaccattttaactctttttaagtgtacagtagtagttcgtttgcattaagtacattcacatcattgtgcctcccaaccccaccatccatcgacagaatttgttcatcttcccaggtggaaactctgtacccattaggcactggtgtccactctcccctctccacagttgtcagccttctgctttccagctctatgaatttgatgactctaggtatttcatagaagtagaatcatacagtatttgttattttctgtctggctcacttcatgtagcataaggtcttcagggattatctgtgttgtattgtatgccagattttaattcctttgaaagagtgaataatattccactatttggatatgcctcattttgtttatccattcatctgccaccggacatttgggttatttctgccttttagctattgtgaacaatgctgctatgaacacgaatgtacaattatctctttgagtccttgcatttagttttcatttatttttatttttgagatggagtcttgctctgtcacccagtcaggagtgcagtggcatgatctcagctcactacaacctctgcctcctgggttcaagtgattctcctgcctcagcctcctgagtagctgggactacaggcacctgccaccacgccaggctaatttttgtatttttaatagagacagggtttcaccatgttggccagactgatctcaaactactgacctcgcgatctgctcaccttggcctcccaaagtgctgggattacaggcgtgagccactgtacccggccgagtccttgcttttaatacttttgagtatatatttatttagagatggagttgctgggttatgtggtaattctgtttaattttttgaggaaccatcatactgtttttcacagtggccacaccattttacattcccacttattctttaataatttgtctgtttaacttgagaactaaatgagatgtttttatgaatcatgactagctttaatttggattgatggctccaagggtggtctgttgaaatggttcatggtggtttgttcaggttcctcggaactctgtgttatttcttacaacttttaccaaataaaaagactgtgcagcacaggctgtattttaagtgaggtcaacagattggcattaagaatatgggctcctcatggcaatagtgtgctgaacattgtacttgctcatgttagaatgtcgtcagtcacaagtcatattcccagcatgggttcgtataacctctgcagtggggacagtgccttatctcctgtttttactttttagctatctgggacacagaagcaggggatgtgtccatcttcaagtctcaaggggttacttctatagcttagagcacatgagttggggagttggctccatgttggaggaagagggtccctttagtcaaactgagcctggattaaggatagctgaagatcttcagccccagccaccagtgagactggatctcccatttgcccttgcctaccttgacttagggccaggatagatctgagcctgaatgctaaacatctgaatgctagacctacgatggaatggaggacagtttcattaatcaggatgggcttgtcatcccagcttttgtattatcaaatacattaggcatagagacttttccttaagatctgtggcctaattagctcaagatttcttgactttgtatctaatttgaagaaccgtggtggttcctgcagtgggttggcttctgagttgtggattttgatgttgggttggcttgtcctgaatgccaggtaaagctacagcagtacctgagcctgcttgctggtgctcctctctgctgtttgcagacttttttgcagaattgagaaagtttggggaaactttttattctggataaaactgctcgtcttcactttctttagagttactctgaaggatagtttgaggtaaagtatctgtctgtccttcatcttccaccttctaaggtgtgttgagtccctgcagactttctagttttcctttatcatttattacagatctgccctagaagaatatatggaatatatgtatgtagtgtatctcagaggggtgctctctatagatttctgtgttgagaaatatttgtagttaccctaagtgtattgtttaaccatttatgtgatactgtgtggttctctttttagaattctgtaacttggggggaaatgcatattccctgtatgcagggaatatggatactccaggaatacatgtatatattctcttggatgctccatccagagttcatattatcaggtactcttcatctttctgggggaagaattcctgtttcttttaatcttttcatttgagaaccctctcctcttgaccatttcctttttttttctttaaagagacagggtctccctatgttgcccaggctggtctcgaactcctgggctcaagggatcctcctgccttggcctcccaaagtaccaggattacaggtgtgagccaccactcctggcttttttttttttttcaagacagagtcttgctctgtcgcccaggctagagcacagtggcatgatcttagttcactgcaacctccgcctcccgggttcaagtgattcccatgcctcagcttcccaagtagctgggattacaggcatggtggtgcatttttgtatttttagtagagacggcatttcaccatgttggccaggctggtcgcgaactccaaacctcaggtaatgcgcctacattgacctctcaaagtgctgggattacaggtgtgagccactgcgcctggccttgatcttttccttctcttttcttggcattgctgcagggcaggtatatttttaggtcagtggtcagagcagcagacagcctcctctaccacagactgagtaggaagtggaaggtgccctcccataatgcacagagaggctgggcttgtgcacccttcccaagtcatgtctgccgccctatgcaataagtagaacctgaagtaaaaaaaataaatgcaccgtcatgcgctgatggtgagaagattgcagccacctgtagctctctggctgcatcccagtcttcccaccccgtctccctctgggttttctcagtggatgtggacagacaattgatagcaaattttgtcagcaactgagccatacagtgttgtggtcttagttttaaaacagaacttttgtttttatttaaagctatttttatttcactgtagactgtatattgctttatatttagactgaatagtatgaaattacagatattcagggccgggtgcagtggctcacacctgtaatcccaacactatgggaggccaaggtgggtggatcacttgaggccaggagttcgagaccagcctgaccaacatggtgaaaccccatctctactaaaaatacaaaaattagcctggcatggtggtgcacgcctgtgatcccatctacttgggaggctgaggcacaagaattgcttgaacccaggaggtggaggttgcagtgagctgagatccgtgccaccgcactccagcgtgggtgacagaacaagactcttctttaaaaaaaagaaattacatatattcaactcctttgggcctttttacaaaactagcaatttcatatggctcaaactaatcttttgtctattagtctgtagatcggtttcctttctgaagattcgtagagagcctcttgacagtgttgtcaaagtgaaactgtgtggtgtgtgtggaagttatctccctggacacatgtgatactttggttggacttcctcttctaatgttattttctaagtttctgacaaaattagaatgacccagtagtgcttcttacattgtccataatacgttaaaatttttgtttcaaaaacttttctcccccacagtttttggttttacttctgatgtgaacttgaattgtacctgggcattttgtgagacattaatctcatcaagggacaatttgtcagtcttctagtttgctagggaatagcttaagaggagccaagttaactttccatagcttggagtttgagctaagaaagcaagttaaggagggaggacttgttttgtttggatttttccaagaggaaatttctgctgctggagatttaggagtgtcagatgcgtcccatcatctgataattgtatttgcttcactggggtgtgggtgcaaactggaagaaaatgctttagctcagtggttcctcaaactgctctctgttgtattcatgaggggaaatctttaaaataccactggtgtctggactcttcccctaaacattctgatttaattgctttagggaaattttaaaagctcctatgtgatactaataggcctcaaatatgtgttcagcttaattttatgctttataactaagaccttccagttcacagagatagcatatgggttgcgggtttaatccccctcattggtgaataactccttcggacttgtaggtataaacctcaagcatggtagctgttcatcagcccgagtgtcctaccatctggtctgggaatctcatatgcaggagagcccgggtgttgagtcaggtgtccaggcactttgtagaagactccatgaagtcctctagtggcagattggcaagggtagagattgagtgtggactctgagagcaatcatggactcagagcagtcagacctgagttcacatctcagtgctgtcattttctaagctgtaaaatcttaagagaagcacattcgcttcccagggccagtttcctgataacaacttgttgaagactactctttccccattgaattaagttggagaaaatgtagattagatggccatttatgtgtgaatctttttctggatcctctattctgttttgttgatctatattttctttgttttactttagtagtcagatggatagaatctattctttcttcatagcaaattatcttaattactatagctttataaatcaaatagtgaaagttacccaacctgtttttcttttatgattgttttgactattctaagtctcttgcattttcatattgactttagaatcagcttttcaagttttacaggaaactgttgggttatgcatcttgaattctaagacatggtcttagaattccagatgaagtaattccagatgaagtaattgccctgttggagaagtaattctccaacagggcaattctatccacctgactattaatgttaagagtgggcatcttaacattatttagatttccagtctaagaaaatagtgtatttacctattcctcagttatctacatctttatacatttctttttcttttttttttttttttaagtggagatggagtctcagtatgttgcccaggatgatcttcctgagctcaattgattctcctgtttcagcctgccaaagtgttgggattacaggcatgagccactcacgccaagccctagatctttaactctccttgtaattattaggatagaggtcttaaagatcatttgttatatttttatattttatatttttatatttttatatttgttagcatttaaaaaagaatgccataattcaaagtagcatttgtgctgttataaatggtattttatttatttattttatttattttttgagacagactctcgctctgttgcccaagctggagtgcagtggcacgatcttggctcactgcaacctccgcctcctgggctcaagcaattaccctgcctcagcctcctgagtagctgggattacagatgcatgccactgcacccgactaatttttgtatttttagtagagacgggattttaccatgttggccaggcaggtctcgaactcctgacctcaggtgatccacccaccttggcctcccaaagtgctgggattacaggagtgagccactgtgcccggccataaatcgtattttaaattttcacttaccgtttgttgttagtatatagaaatacaattgatttttgtatttttgctttgtttcctgaaaccttgctaaagtgcgttaagttgcagtaatttttggctgattccttaggatagctatttagataatcatgcctttggataaaaacaaatatactctgtgtgtgtgtgtgtgtgtgtgtgtgtgtgtgtgtgtgtgtgtgtgtgtgagagagagagagacagacagacagacagacagtgggggagagggagagaagaagggagagaagttaaaatctccggttatgagagttagtctctttttctccttaatcatgaactttttgcatcctgacttactggattcacttgtatttaaagtttcttactggattcatttgtgcttaaggtttatttgtatttaatatcccctcatcttcaccgccatacaatatttatgctttaattattcagttgtctttccacaatttaaaagaagaaaaaaatagtttttaaattacccactgaattactatttctggtgctcttcattccttccctttagctccaggtttccatttgatataattttttttcagcatgtaaaacatctattagcatttctttattttctttttttttttgagacagagtctcactctgtcacccagactggagtgcagtggcacaatctcggctcactgcaacctccgcctcccgggttcaagtgattctcctgtctcagcctcccgagtagctgggattataggcatgtgacaccacacctggctaaattttgtatttttggtagagatggggttttgctatgttacccaggctggtcttgaactcctgacctcaagtgatctgcctgccttggcctcccaaagtgctgggattacaggcgtgagccaccacgactggccaacatttcttatagtagaagtctgctggccatgaattctctcattttgttctttaatctgaacaaatttttttttttcttttgaagcacatggttgctggatgttgaattctgggtgatagctggtggtgtctgcccctctcccttcaaaggtgttccattgtcaactggccttcattctttctaataagttgttagccatcatttgtatctttattaccttgtttgtaatgtttctctttttttttttttgggttgatttttttttctctttgatactgattttttagaggattgataatgatcctaggtataatttacttggtatttatacttctcggagtttgctgagcttcttggatctttgatttgattctttttattattgtaaagtttaggaaatatttaaccattatatcttaagttttttttgacttattctcacactcttgtttttcttggactcctattacatatatattaaactatttgagattgtcttataggacagtcagtctttttcacttttattcaatcttctctgttgcttttaaactgctgataagaccagccagtgatttttcttttctcctttatttctcatttcagtattgcagctctagagtgtttattgggctctttttaaaaatactttacactggccaggcacggtggcatgtaatcccaacactttgggaggccaaggcgggcagatcacatgaagtcaggagtttgagactagcctggccaacatggtgaaaccctatctctactaaaaatacaaaatttagctgggtgtggtggcggacgcctgtaatcccagttactcaggaggctgaggcaggagaatcgcttgaacccgggaggcagaggttgcagtgagctgagatcacaccactgtactccagcctgggtgagagtgagactctttctcaaaaaacaaacaaacaaacaaaaaactttacacttttttgctgaaaatctctatctctttactcatatttttcctcagtttctttgaacatactaacccattgtacatttatacttgtttctgtaaatcttaaaatccaatgtgtgtgcctacttggatttacttttattatttatatatttgaggggtttggtttttattatgaagactgctttctttattgccctgagttaaattttctttcttgcatgtctaaggttttttattgtggacattttggatgatacattgtatgtctgacttctgataattctaaaaagtattgaattttactccaataccatattaactggctgaactcataggcctgttttttatgctttgttagggcagaactttggaaattttcaggtgttttccaagcttctctaacttgatgggactcaagattcaaaacatgtgtcatttgcaggccctgttaggtagtgcttgttttttcttgggcaagtttagagttaactcttttttagtgctcaacctgggtagcacttgacatttagggctaaataatttctttttggggatggagaggctgctccgtgcattgtaagatgttgaacagcatctgtggcctctgcccactagataccgaaagcgtccctctagttgtaacaaccagtagtgcctccagtcgttgccacatctctcctgggaggcaaaattgccctgtttgagaattatttctctggatagtgctcttgaattctaagacatgatctctctggtgtttcaaccgtatgccaggtgtgttaatgatatatgaatgaggtttccgcactctggtctggtgagaatttcagtacctcacctcagcttgaccttcagtatctctattcagctcactcctcctcagcaccagctctctgttaaggcttgggcggccttgacctgtgcccgcgcatcagccaaggacttgtagcacccccaccccacagccttctggggcccttcccttctgatacctgcttactgtccagggccatgcagatgccagtggctttaactaacccaagctctggcctccacccctttgctcagcagggctgctgtgatgtgtttggacttcagctcactgccacagtcggaaagtggtgtcctagctcagagccaaggcaatgcttggtgtctggagacatctgccttctagtgttgtacagttctgaggcagaggagtgggccgttatggtatgagccacttagccgtggccagagcccagtctctctgctagttgaatagcccagatgtttatgagctgtggagctgggagctccaagtgtacagtatagggtgtggttgtgtgagctgtaggacatgcctgtttaacttccttactgaatagatggagggtgagggcatatgcaagactgaggggctccagcatctgccatatgtcacctgtgtgcttaacaaaaaccccaatcctggggccatctcagacctgacctgctgtttcagaatttctagagaaagggcctggaaatctgtatatttaatttgtgcctcagggaagtttctgtactagaggatggcgaagggaacaacaggtgtggagagggaggctggacgtggcttccttgaaagggaaagggccgcatgaggctctgcattcctttccccaggacttatattgaaatcatggccaatgatttatttattttttaaaaatattaattcagtttttaaattttagttttttttctgttttttccttttttctatcttctaagacatcctgttatagcaaatttttacattttttcattgccctgccctgaaaatgtttttatttctcgtttttttttttaacatatttctctaggtttagaatttgtattttgtgcttatttactgtcaggccttcaaacataattgatttgtttttaatctttttctactaaaaattaaaaaaaattgtggtaaaatatacataacggtcaggcatggtggcttacacctgtaatcccaatactttgggaggctcagatggctggatcgcttgagccttggagttcaagaccagcctgggcaacatagtgaaaccctgtttctacaaaaaatacaaaaatcagccaggcatgatggtgtgtaccagtagtctcagctacttgggaggctgaggtgggaggattacctgagctcaggaagttgaggcttcagtgagccatgattgtgccactgtacgccatcctgggcactggagtgagaccctgtctcaaaaaaatatctgtcacataaaatttgtaatttttgcaaggcatggtggctcttgcctgtcatcctctggtgtcctccattttactttctgtctgtaataatctgattactgaagggacctcatccaagtgggatcataccatatttatccttttgtgagtggcttatctcacttcgcatcatgtcctcaggtaaatttaattttggggtttatgtcatacattttctcagcatttagtgaaaaacttctgcctcaccctgatcctcaactgtggtgctgaacctttatttagctgtagtggaagaggaaagaatttctgagattctacccttttctggcttcttgctctgagcaactgcctgtgtcctgatgtgttttgaagtcctcatcttctcctttctactccctctgggacccattagctgaaggaacagggtcattttctcttttggatctctcctgggggtaatagctgtgggcacagggctgttatttgatatgcttatcatagagtcgagaaagtgggaaggaggtaccttggtaaagagtgtctgtccctcctctctctgtgcatttttctcctaattcctttatcctcatcagtgaaagagatgaaggcattactgcatttggtatgtttggttgtaaaaatgtatgttagtgaataagtcattagtaagacattttctgacatctgtcattttttttcctgctgcacaaatctcttcattttcttaaagcttcaaagataatcttgaaatgggaatgaatgatggaatgaattttgcagtattacagtactgtgtactgttactttcggattactgaatatctggcctactcaaggtcaatactttgataaatacacaacattaggaaaaaaggaaaatcacgtatgtaaaatattttcattttgactgattcttagtaaaattttggtgagtctgtagagtgaagattgcttcctccaagtattcttagtcttaaagacggcacatgaaacatgtcatatttgagaagatacattataaacacatttcttatttgtttcttataatattcttttagaagcagaaagcaggctgggcacgttggttcacacctataatcccagtactttgcaaggccaaggcaggtggatcacttgaggtcaggatttcgagaccagcctgatcaacatggtgaaaccccgtctctactaaaactaaaaaaaaaaaaaaaaattagccaggcatgatggcgcatgcctgtaatcccagctacttgggaggctaaggtaggtgaatctcttgaatctgggaggtggaggttgcagtgagccaagatcatgccattgcactccagcctgggcaacaagagtgaaactgtctcggggggaaaaaaaaagcagaaagaagaaaaacatgataaaaaagatttttaaaaaatgatgatggatgccaaacacacctctaatcctagaactttgagaagccaaggcgggagcattgcttgagcctaggagttcaagaccagcttggacaacatagggagattctgtctctgcctcggccctccctgttctaccctccaaaaaagccaagtgtggtggcacatgcctatagtctcttacttgggaggctgagacaggaggattgcttggaccccagaggtggaagctgcagtgagctgcgatcatgccacttaactccagcaaaaagagcaagaccctgtcacacacacacaacaaaaagatgacagaagtttggtttttttcttcctcttcaatgggggtatactgcatttatattctccttaagatgatcttctctgacctaaccctagaccatgtatttgtccccatgtatgtcctcactgtcccttctttacccactccctggcttgtcaccctctccatattttcctttttcttcctgttgccctgccagtatgtcttgctcatctctgttcccctctcagtcgataaaccagttcagttggggcttgtttttcaggcaaagaaactggtgatagcagggtctggggctgaggggtctttcagccatggtggggggatgtggcccccctttgaacagattactctcaaactgtgttacatgttctttccatgggtattggtagaattgactaattagattgtactaatttccttcaatgtatattgactgccccaccactcattgaaacgctaatggttttttttccctttcttttcttttccttccttcctttctttctcactctttctttctttctcactctttctttctttctttctttctttctttctttctttctttctttctttctttctttctctttctttctctctctctctctttctctctctctcatctgtctgtctcttttcttttcttttctttttttttcttttctttcttggttttgctctgttgcccagactggattccagtgggatgattactgcttactgcagccttgagctcctgggctcaagcgatctttccacctcagcctcctgagtagctgggactacaggcatgtgccaccatgcctggttaatttttaaatttttttgtagacaggatctcactacgttgcccagtctagtcttgaactcctgggctcatgtgatcttgccgccttggtcttctaaagtgctgggattacaggcatgagccaccctacctggcctacggagaactttctgtataggttttcaggcttgtattccagccatgaaaaatcaggtgaaacacaaacaaaagcctcagaaggcagtgaaactgtcagattataaagaacatacaggttgttgattttggatggacattttcatctccttaaatttcatttcttttacagaattagagaaggaatgtgactttggtagtcacccatcatgtttacgaggaaggaggatattagccagtccttggatcatcccctcagaaacagagattattggttttagattgtgcagtcattaaagtagatatgttgttactaagcaactctggccaacagtattggaaaaatacaggcaattttctgcttcaagtgattaaacatactcatcctagttgcctgttgcagaaatacccagtttaattggaagtttcattacctcacaaactcaactctggggtagggtcatgaaccaggaagtaagcaaaacataaaataaataagatagataatacttactttatatgcttattcagaacgtttttactctgactttacttacagcactcaaaagccacatcctagtctaaaacactagtaggtaatggtgtgacattctgatgagaataaagagatacctgatagcctgacagccaggggcaagatggatcaggaagtacccgaatccgaaaagtgtggccatttggggactctgtgagaggagcatccctgtccaccccgggtcattgacactgggtaagagccatattgttgtgaggaatttgcatcgtgaaggtgatgaactgcggtttgcatcttttgttttatttatttatttttttaatttttgagaaggagtctcactgtcaccctggctggagtggcgcaatcttggctcactgcaacccctgcctctcgggttcaagcgattctcctgcctcagcctccccagtagctgggattgcaggggtgtgcgccaccatgcccagctaatttttgtatttttagtagagacggggtttcaccatgttggccaggctggtctcgaactcctgatctaaggtgatccgccctccctggcctcccaaagtgctaggattacaggcatgagccaccgtgcccagccgcatcttctgttttaaaaggactattagagaggggggaaagacatctgttaaaatgaagattggattaatgcatttaatccaaaaagggatattcatctcaccagtctggaaaactcagttccatgaaaaggtcattctctccttccacctccctttgatggtgatatttatgtggccacactgattaaaataatcaagaaagaagaaacagtttatatttttcaaatgaagctagatattacatgatttatttttaagaaattgaatacaattaatgttttgttctagatagtacagttttcttgtaatctcaaatgtatttccttgcctgccttcagtagtaagcagctatcaaatggtgccctgctctgatggtgtttacttccaccattcacagtattgttcttaatggcatgcggattctagagtaaccaataattagatactcagatgttttccagtttttagtaattagatagttagatgtcttctagtttttgtatattacaaatagcattttaatggacatgattaaagctaaacatttggacagatccttcatttcctagggcgtacaaatttcaaggcttttgctatgctagattgatttcctccccaagagttgttaattacttacattttccccggtgaaatgagagagctccctacaagtccagatttgatgttatattttaataatcactgtcaatctcaccaattttcataggtgaaaaataatgcattgttgttttaatttacatggctttgtgtaatagtggatttcagcatttgcatttccttggccatttgtgctggttttttttttttttttttttttttgtgaatttcctgcacacattctttgctccttttaaaaaataattggtaggcatttataattcatatcgatatgtaggggccgttgatttattaaagatattttgggtctgggatgtgtactacaggttttgatttcagtttgttttagttgccttttatttgttctcatggtagaactattttgttttcacagggaaaacaaatttaatctaatggtgtccttttataacctgtcaggttaatgaagcatagaatcaaaatatttgcagaacgatgatacattaatttacagattttttctgtacattggatgtgaactcttttaaactataacatggacactttattggaaccaaactttagttttctacattaatgagaaacactggtaactttgcttcattgaaaaaataattgcttgttctctgtcagatgtaagtagtttgagtttatttttatcttctcatctacaaaataggaataattcttacttcatagttgttttcttgttcagttgtctggcttacagtaggtgcttactaaatggtagcttgatttatgatcataatgacataaatgaatatgacttggtctatatattctggtagctgctgagggtaacacagatatatgattacactaattgtacttctgaggatgtgagcagtgttttgttgttgttgtttgtttgtttctttggtgttgattttaggtagaactttgattatcaattttatgccttctttttaaatgcaaagtccttaaagccaaaagtttactctaagacttgctttagctataactcgcaaattattatcatttactttaaaatatttcagatttcccttatgatgtcatctttgacacatgcttatttagaaatattgttaatattcagatattttgagttgttagagatgtcttattgttgatctgtaatttaattctgctgtcaccagaatacattctgtgtaacatttttatgttcagatattgattgaaatttactgacggcccaacataaggactattttaccttaaaagttagaagtatgcaacagtaaaattctattaccttccccatcttgtgtgctattgtcgtatattttacttctgtctccaaaatgcaccattaccatttttgctctaagcagctagttgtttttcaaagtaatttgtcttctttttatttattttttatttttttttagacaaggcctcactttgtcaccccggctggagtggagtggtgtgatcttggctcactgcaacctccgcctcgtgggttcaagcgattctcccacgtcagcccccgagtagctgggtctacaagtgtgtggcaccatgcctggagaattgttatattttttgtggagcccaggctggtcgcgaactcctgagctcaagcaatttgactgcctcagcctcccaaaatgttgggataacaggcatgagctatcatgcccagcctgtccttatatttactcacattggtcattttggtttctctttattctttctgtagatctgagtttccatttgataccatctccttatagcttgaaaagtattctttacgctgttttttacagttcaggttcattgctgataaagtctctcagcctttttctgaaaatgtcctaatttcaccctcatattttaaaggacattttgtgttggtgatagaattcagagttgacaggtgtttttttttttttttttttgaattggagtctcacctatcacccaggctggagtggagtggcgcgatctcggctcactgcaacctctgcctcccaggttcaagtgattttcctgcctgagcctccggagtggctggaattacaggtgcccaccactgtgcccggctaatttttgtatttttagtagaggcggggtctcaccatgttggccaggctggtctcgaagtcctgggctcgagtgatctgcccgcctcaaccacccaaagtgctgggaatacaggcatgagccaccgcacctggccagttatttttgtctgtctttcagcactgtaaatattgttctgttgtcttcttgttttcattgtttctggtgtgtcagcttctgcttgtttttgttgtttctctgtgtttaatgtgtgtctaggtatagatctctttgtttttgtccttcattgaacttgctaagattcttcattatgtaaattaatatttgctaccaactttggtaaaattccagtcattatttgttcaaatattttttcttcccctatttcttcttcttttaggactccaattacatgaatattttattgcttaatattcttccataaggaccttcattcagtctttgttctttttcttaactctttttttctgtttgttcttcagatttcagttgtaaactatagaaggaagggttagcgactctgggaataaatcaatggaaagtatctgctattaatgatatctaatttatttttcatttcaggtattaccttttcagtttgagaagttctatttggttctttttgatattacctatctcgctcctaaactcacatctacttgttataaccatatttttctttaactccttgacatattataataggtgcttcatagttgttgtttactaattccaaaatctggatcatttcagggtctatttctgttgccatttccctcctttgattacaggtcacattttattgtttccttgtgtatctagtaattgttttactatgttgaacattatgatcgatatactatagggagtctggattaaagagcattgagttttgttcatgcaggtagttaaattcctggcagattggcccctttagcattgaatccttctgtctgtctgtcaatcagttaatcatagggcaggtagctccattctgaacttattccaagtgcacagctgttaatctagggtgagatctttattactaagacatagccttcctggtgtctcaggtgaatgcctgaggcccagtggagatttccttcctctcctcgggcggcatctcctactgcatgacctccagaatcttcggtcagcactcagccccatagctgctgctttcctaggcctcatggagtctggccctgcttatgaagccgttggcaaagtaccctgggtaaatccctactgaaacttctggggcaaaccctctgctactcaggctcacaaattccagatgcttctacaacttggaacaaccatctcttcctccaccgctcagtgaaactgttttgcttgggcagaaaatgtcctcaggcataaagccaggtcagtcccgggccaccacctacatttcccgtctcttgaggctcacagcctgtgttacctgtggtccagtgcctgaaaacagctgtgtcatatgttttgcccaacgttacagttttccaggggagggcaagtcctctctcatggttggaagcagaagcctggtagtttgcttgtcagctgtgtcttcctctttttttttttttaagatggaatcttgctcagtcgccgaagctggagtgtaatggcacgatcttggctcactgcagcctctgcctcctgggttcaagtgattctcctgcctcagcctcctgagtagctgggattacaggcacctgccatcatgcctggctaatttttgtatttttgtagagacagggattcaccgtgttgaccaggctggtctcgaactcccgacctcaggtgatctgcctgcctcagcctcccaaagtgctgggattacaggtgtgagccaccgcacctggcatgtcttcctcattaataatattcatggcccttcatgattttttttatcctatctggagtatgactgatttaatttcagcaggcccttaatttctgtgttgactgtagagttatcgttcacttgggttaacttctattacaacccgagtatctgcccagccttttattccacctctacacctggtcacagtaatacacgacttacaagtagccctcctggtgcacccagaagaactttgtctttttcacaaattggcatctgtgctgtcttacctaaatcctcattgttggcctcagacacaatctgtggatgatagttcaagttgggcacaattgacttcagatttcttgaaaagggtcagcttaggcttagagtttggtgttgacattttgcttttatttttttaaaattaggtatcaaatttacatgctttaaaaatgtggtattttctgcatgtgggattaacattttgtatgtaagactggctttataaatatttacagatagtttgtagtcaataaggcacattacgttctgtttctttcctacaggggcgggctggtctctctccttccctttcttctccctcactcctacattttcttctttctttgtattttacgattgattcacttatatttgcataatagcattttttaatttttttttttttgagacagtctcactctgtcacccagactggagtacagtggtgcaatcttggctgattgcaacccctgcctcccggttcaagtgattttctgcctcagcctcccgagtagctgggattacaggtgcacaccaccacaccaagctaatttttgtatttttagtagagacagggtttcaccatgttggccaggctgatctcgaactcctgacctcaagtgatctgccttcagccccactaagtgctgggattacaggtgtgagccaccgcgcccggccattttttaacttttcaaaatgttttcacttctatctggccctttttttcccattcacatagccctcgttgacagtcttgttgccttttgcctggactgttattccagcggcaactcattctcctccttccagtagtctcctggccaattgcttctactgtttaaccttccttaagttgagtttctccctctaacttgaaaaaccacacgtactgttccatattgccttccataagcttcacctgcttcagccctgcttccatgagcttcacctgcttcagccccatttccataagcttcacctgtttcagccccgcttccatgagcttcacctgcttcagccaggtttggggtgttctttattcagcagcctccacatcctccttctccgtacttctgtcctagctaggcctcccctgcagtgcccttcccttccctccataaagtccctccttcatcgtccagggtctctcccacccagtgtccctcagttcgaactgtccccagttctctgtgcaggtcacagttgaatcacaggtgtctggacatacctagccctgtctcccaaggcaggaaaacatgactgtgtcactgtatctgctggggctcctggtgtcctccagatagttgatactccatatttgtcatttcccattgaacacattgaaaccctgtgatccaggcagggtgaagagactaaggccccatgtgtttaataatgttgcacagagaattagtgattggtacggatttatagtccacgtcctctcattttgttcctctgacagcctctctgttcttccctaatttggctcaaaattactttggttggctcttaagtagaaacttatgtccttttgtacttgggggcgtgtccaaattcattaaatgaggtgggagatttttcttcttcctacctctcgctttgctgtcctgacacagctgccaccactaaaggtgctggtggggcagagagagggggcagtgggggggtggggatgcttgtgcttagatctggtcttgacatcacacgagacttcctcaggtctgctgtgtcctaagcctgacttagtatcactgcatgaatacaattctctacttacctcttttatttcaggcacttcgtcttagtaacatggccatggggaagacaaccacaggccagatagtcaatctgctgtccaatgatgtgaacaagtttgatcaggtaagctgcagctcagggatcctttttcattgcattaaacacccctctttccccttttattctttctggaggcaggggctcactctgttcacactggattgcagtggcaggatcatagctcgctgaaggcttgaactcctgggctcaagtgatgtgcgatcctcctgtctcagcctcctgattagctgtgactacaggtgtgcatcaccgtgaacagctaatttctttttttttgaattttcatgtcagatgggctattgtggaaacatcataacaaaattcaagggtggcacatctcacacaagtgcgtgaacacccgattatcatgctcatgaactacaaaaggattgctggctaatttctttttttattatttgtagagaagggatcacgccttgttgcgcaggctggtctcaagattctggcctcaagcgattctcgctaccttggcctcccaaagtgctgggattacaggtgtgaacaccatacccgcccagtatccattgtttaatacttaccttgtagcggtatcatttttccagggcattctagctgctggccatattcattttgcactaggaccacttcttttttccaattattcattcatcagaatgaactaaagcctccgctcagtgtcagggacaatgaataagacttggtttctgttctgaagaagctcactgcctgtctgggagacaaacacacaagtaaattactggagtatgtggtgggcactgtagtacaggttttcttggggtactggggagccccagggcatatgggagctgaattctgtggcagagagttctggaaaatgctcagctcatcagtgaagatagtcacgatcaagacattcttctaatgccgctggtcggattctcttgcgagtctcccagacccactctttgtttccccagaatggcttcacctgtggtgggtgcttggctttctgctttagcaggtgtaaacccactgtggccatttctgtttaggatcttgcctgttcttttccagtggatcgtttctgtactgtgttcttactggttttgcttttctggagtcctaagaacgctctgtctttttctttaaaggtgacagtgttcttacacttcctgtgggcaggaccactgcaggcgattgcagtgactgccctactctggatggagataggaatatcgtgccttgctgggatggcagttctaatcattctcctgcccttgcaaagctgttttgggaagttgttctcatcactgaggtaagagaaatactgctgtgaaaaatgtcatatgtatttggtaacatccacagtcttcccaatgcttttgttcagaaacaaactaaatgccttttattatctcttccttgcatatgttgcagctcttcaggctcagccaagggggcctctgtccttatgctgaaggcaaatcttcaagggagaaaggtgaaggcattcactggctcctcccagccagcttttcaggcgctgtggcctcaataagtagagtgtccttaagcagaaatcacatatgtagaagttagttaaacatataatgaataatgataaattgaaatgtttcataggctccattctagctgcatacatctttaccgtgcttgtgttagagctgttttcacgtgtatatatgtgtgttatttttaattcagtatttccattaaattgtaagctccccaaaggcaaggtgaattttaatgatgtagttataaaatcacacagtcctagtagcatatgtgttaggaatatggttgttagctggtcgtggtggctgaagcctgtaatcccaacactttgggaggccaaggcaggtggatcacttgaggccaggagtttgagacctgcctggccaacatgacaaaactccgtctctactaaatttaaaaaattagctgggcatggtggtacacgcctgtaatcccagctacttgggaggctcaggcacgagaatcacttgaatccaggaggcagaggttgcagtgagccgatattatgccactgcactccagcctgggtgacagagtgagactctgtctcaaaaaaaaaaaaaaaaaaaaaaaaaaaaaagaaatacagcttttgatcaagagattaatgatgataaaataaattagacttgaagcaggttccaacgaattggaaatggttcattgtcaaggttgtcagctggatcgagatgagccactgttggaagtgcattgagttctttgttttatgcttttgcttatggtgtattttctacttggaccttcccctctttgccatctggagaaatagtccttgtcctttgaggccccgttcaaatgctcctggtcctctgaagcttttttttttttttttgctctcctctttcccggtggagttaacaaacagccctttcttttctgctccccagcacttcattcccattttagcactctctgaccactgtgttatcgtcaggctcgggtgcctttctgcctttcctgcccacctgtgagctcctcgaggggacagatgacatctgactcattttcatgtcttcctcagcagatattacaaattctccaaaatacttgttgagttggtatagattgttgacttcctaatcgaagtctttttctatttgtattttgagtaggacctgtctgtgttgtcggaagcaaaagcgctgtagggaaccatgtgatgcaggtccctgcctgtgcctgccgctgataagggcaggctgtgatcgctcaggctcatctcccgtgtctggttccccttaggagtaaaactgcaactttcacggatgccaggatcaggaccatgaatgaagttataactggtataaggataataaaaatgtacgcctgggaaaagtcattttcaaatcttattaccaatttgagaaagtaagtttttgtatacattgtaccatatttttgtatttttctatttgctattcttgttgatggttttagaagttttactatgttttcacattatgggaagttcagtacaatccatcccagtccccacgcttggcagttgggttaagtagaatggtagagaacgttattttcacttggtcttccatttaccatgttcttaaacagaaagcatgtatgcttcttactaatacaaaagtgaaattccaaatgtttctgaatatcccaaatcccaacaatgagtctaagatgttagtatttgagaataatggtgtttaaaataaaactataatttatattaatgtagccaaatggacaagttatagagactgggcatatctatattggaccaaactatatgaatcagtatttttcattccaaacaggcatggaaatactgttagttgtgctttgttttattagaaattttggagggggctgggcgcagtggctcatgcctgtaatccaagaactttgggaggctgaggcgggtggatcacctgaggtcaggagtttgagaccagcctggccaacatggtgaaaccctgtctctactaaaaatacaaacatttgctgggcgtggtggcacatgcctgtaatcctagctacttgagaggctgaggcaggagaatcgcttgaaccaggaggcggaggttgcagtgagctgagatcgcaccattgcctgggcgacaagagtgaaactctgtctcaaaaaacaaaatatgtattttttttttggcttttggattaaatatttgattagttgttgcattccagcacatgatacttcttatgatttcttgggtagttcctggccacctctcacctttgcacttttttgttgttgttgcccaggatggtctcaaactcctgggttcaaacaattcatccacctcagctcccaaagtgctgagattgcaggcgtgagccactttatctggttgacatcactgcttttttaaaaacctgtactctctttcaggaaggagatttccaagattctgagaagttcctgcctcagagggatgaatttggcttcatttttcagtgcaagcaaaatcatcgtgtttgtgaccttcaccacctacgtgctcctcggcagtgtgatcacagccagccgcgtgttcgtggcagtgacgctgtatggggctgtgcggctgacggttaccctcttcttcccctcagccattgagagggtgtcagaggcaatcgtcagcatccgaagaatccaggttggtgtcagatgccattttaaagttgtaggtgcatttgaagtagaatgatgtctccttttatttagcatcactatgttccagtgtaatgacatttaactctctcataaccaaaacgtgccgccattccagaatgttgtgtgtacttccctatcttagatagagcgcggtaaagacaatgcaagcattgtgattcatttgttggcagcaacataaacagcagtggcacagggcttttgatgtacaggtggtaactgcaggggtgattaaaatgtctaagctgtctaaaagcaggaaaagcaaatagatttcatctcttatgttaacaccaatgagaaagtagtgagtatgagttgagtatgattcttctgtgggctggaaggaaagagcttgctgggggtctctgcttcttggtcaggaagaatggcctcaacttcacttagctatccctgtttgaaaataagttctttcctctgtagatgttttccttgttaatttctgtgcatgcctttaggacctctgccatttctttcctgtccgcttttcacttttttcttactgttgatgaacctatctctgccagacttctttatttccaattggttgatttctactgccttgctccatttgtacgactgtaacaaggaccactctctgcttcccagatggacctctgtgtcctcccatcgtggaggaaacagaaggacaaaatgggcctggttagttctctccagccttctgtaaggacactaatccccttcaggagggctctgccgtagcgacctgatcacctcttagaggccccacctcttaacactgatgctggggtgaacttccaacctgtgaatttagaacaggcatgcccattcaaaccatagcatccactttacacaccatcaccttttcctaagtcgctgtcactcaattgccaggggcaaataatttatatcaccaaggtaaggtcctggcacataatgtatgctcaagtatttgtgtgtttatgaataagttgaaaattaaaataaattggctttgtgagagggcttggcaagaacttgactgtctaagcttttcaaaaatctgctttgttttattcctggttcttaatagagatggatgcccaaggacagactcgagtgaacttagctgacactggctgtgattatttttttatttttatttttttggtaggggagagaatggggtgggtgttgtcataaaagctaagattcttttttatgatgaagtttgttttttaaagatgagatcttgctgtgttacccaggctggagcatagtggctattcataggcagactcccactactgattagcaagtttgtatttcataaaaaatattacctataaaacagaccatacagggtcatttcttatccccattctttctgacaacagcttcaggtaacactgtgaagggatggtccatgcaggtcagtaacacttttttcatgtagcttttgcatcttgaaagaaagaacttaggagtatactttgaccagagtatctttctgagtgtgcaggacacctttttcagacggaagggccacatgtgtattgtgctgctgtaattctctgactgctgttgctgcccctcaccgtgattgcaggtgttggtgtgtgtaccgtggaccagggctcttggaagcctgtacatgttatttcatgttatcctcacaattgaaggagataagcattagtgtccccactttacagagaatgaaactggctcctgtaataggttaaggagtttgcctatcttagaactaggaatctgttcagaaccatgatttcttaaccatggtatgttgcctgttgtattaatctgtttttatattgctataaagaacttcctgagactgggcaatttatattggaaagaggtttaattgactcacagttcagcatagttggggagacctcaggaaactcacagtcatggcggaaggggaagcaggcactttcttcacagggtggcaggaaggagaagtgcaagcagggaaaatgccagacgcgtataaaaccatcagatctcatgagaactcactatcactagaacagcacaggggaaactgcccccatgatccgattacctccacctggtcccacccttgacacgtgaggattatggcgattacagttcaagctgagattcgggtggggacacagagccaaactgtatcacctatgttgctgccttagtatcctctggtgtgggatatttccttcagtattcttttactcatctagttgtattccaaaaaccttgaaaggttctctgtttcttgtggagtcctatttttgaaccctaggtgtagggcttacctgtgtgtgtttcccagcacatgactcgtctctgttcccactttggggtcttttgctctgtgtggctggggtgtcctcccttctgtccttgatttaagcaaatgctactaagccctccggccaggtctcaggagcctggtggtacttttgttcctgccgagcaaggccagtacggtgcagctcagcattgatggacacataatgggcaccaaatgctggatggacagaagcagcaaccttagcaaaagtctggggcccaatacagacccaaggtggcccagcctgcactagaagctagaggaaggccgagcgaggaagcagactcgagttgaatattcccagaacaccaggccttgttcaaggggggtgtgagggtccttaactctggggagctggatttttttcagagtggactggatcggagtctctgcctcgttatgtgtgtccctctgtgcatctcaaaccctcttggacttggtggacctgctcttgtaagagaggggccatgtctgacattaaatatagaccctcctggccaggcgcggtggcttacagctataatcgcagcactttgggaggccgaggtgagcggatcacttgaggtcaggagttagagaccagcttggccaacatggtgaaatcccgtctctactaaaaatataaaaattagtcaggcatggtggtacatgcctgtaatcccagctcctgagctacacgcctgtaatcccagctcctcaggaggctcaggcttgcttgaacccaaaaagtggaggttgcagtgagccgagattacgccactgcactgtagtctgggtgacagagtgaggctctgtctccaaaaaaaaaaaaaaaaagagcctcctgactggcttccaggctgtgaaacaaatggactttccttgggccatgtggagaaatagaaacagtcttacttggttaataaaattagtctgtcttcctggccattatgagataaatgaagattaagatcaagaccatggggctttatatgaacaggtaatagctggtgagtacccactaggtaacaaggaggggcccaagtgccttatgaatactcactccttttacttgtgtaactcccctatcattcccacattacagataaagaaactgaagcctgaggagggtgaatagcacctccacgttttaacagttaataaaaggctgatccggggctttagcccaggccgtcaatctgtctcagaagtgcggccaggcgcgatggctcacgtctgtaatcccagcacttttggaggcctaggtggacggatcacttgaggtcaggagttctagaccagcctggccagcatggtgaaaccccgcctctgcaaaaaataaaacaacaacaacaaaatcagctgggcatggtggcacgcacctgtaatcccagctactctggaggccaaggcacgagaattgcttgaacccgggaggtggaggttgcagtgagctgagattgcaccactgcactccagcctgggtgacagaggagactccatctcaaaaaaaaaaaaaaaaaaaaaaagtgcacattcttatccccacatgcacagcataacctgaatgcagatctcacttccatgcggcagccataaaaaataattgggcaaagagcagccccaacaggtggtatggcggggtgggacgcagaccttgggttctcaccaactctctgggccttggttttattgtctttaaataaggggattggacttagtgtctggaggtcatttcctattttgtctcacttatttagaaaaccgtctgtattagtcagagttctccagagaagcagaactgatagggcccacgtgtatgtacatgcagagagagattggtagattgattgataaaattgtctcacgcaacttggaggtgacgtaagtctgcaatctgcagggcagctggcaggccagagaccctgggaagagctgatgatgcagcttgagtctgaggaggacagtcttgaggcagaattcccttttctttgtaggtcttttttctcttaaatgccttcaactgattggatgagccccgctgacattatgtaggattttaaagtctacagatttaaatgctaatctcaactgaaaaacactttcccattgatacccagacatgtttgaccacatatctggggactgtggcctagccaagctgacacataaaattcaccatcacagtcttttttttcttttgagatgagtctcactctgtcggctaggctggagtgcagtggcacgatctcagctcactgcaacctctacttcccgggttcaagcaattctcctgcctcagcctcctgagtagttgggattacaggcgtgagccaccatgtccagctaatttttgtatttttagtagaggcaaggtttcaccacgttggccaggcaggtctcgaattcctgacctcaagtgatccacccgccttggcatcccaaagtgctgggattacaggtataagccaccgcacccggcccatcacacactctttaatcctcatctcttcttttgggctctccatacgtgactttgtcctcattttccccttattattgaagccatttgtttatagatttctttcccttcctaaactctaaacttacaaaaggcagacacagtgcctcattcatctttatattacgtatagattgcaggtgctcagaagatgtgtaagtgaagtcaacctccagcttcattacatctatgagatttggaaaatgcctaacaactgagcattattttagtgggaagtgatgactgtcgttctctgctgaattatgtcacacatcagagagtgtggcatgaaagggatcctgcagacgattttcagggaattgtggtccaatatgcagctagggaagaaatccttaggattttttatttttttcccaccaaaatgcaactcacctgtgtctaaggcttgaaattcctgttcctgtagatagatgtatgcatgtagtaaaataaaatgaccggctgggaattttacattttccagtggctaactttggcaaggtgctctgtgtccagataaaggatgcatctttgacttgggcaggaaaccttaatttcccctcatgtacatagtttctggtgggagggtgggcctagagttcagcagtagtgattttcagtaaaggagaaacaaatggccaggcatgactggtaagaaagcgttggcgctcgtatggtaaactccttcatggtggtgttgaagtcattgttggaggttttgttttgttttgtttatttgtttgttttttcttcctttagaactttgtgttttttcaacctggatggttcctgtaacccatttaaaattttgtccccaagttcatcagaattacctgatgcactgattaaaactaaattattacaccttggagattctgcttcatcaggcattggctgggtcccaatatcttttgttttgttttgttttgttttgagacggcgtctcgctctgtcaccaagctggagtgcagtggcgtgatctcagctcactgcaacctctgcctcccaggttcaagtgattctcctgcctcagcctttggagtagctgggactacaggcatgcaccaccacacccggctaacttttgtatttttagtagagactgggtttcaccacgttggccaggatagtctcagtctcttgacctcgtgatccacccgcgtcggcctcccaaagtgttgggattacagcgtgagccattgcgctcagcccaatcaatatctttagaaagtgtcctcgtgtccctgaaaatatgctgtctttgggaaaccttgccctagttgtgtgataaaaaaacgcatgaggtcaaaatatgtgtagcaaatagaaacgacgtcaggataacttaagactaaaatcatttgagaggaagcacgcagacacctgttttggtctatgctaggcttttgggggttaagtttggaatttattcattcacttagtcattgactctacaatgtaattgagcacctagcttaagctggcactgtgataaatgcttagatacaatggtaagccaatgcacagaagtccttcctgctgggaacttcctcctgggaatcatcaagtgggggttaataaataaccacgtaattaaaatcagtgctcatgtgtcattgtctttggaaggcaatatctgagatgccatgaggtgctttggtagagatgcccatgccattgtggaggtgtagtgcttcctgcgaaggctcaagaaatagcctgcagcattgtgtgcgtggtagtggagagagatggggaagggtttgggaagggaggtggcttggggcagccaggaggctgatgccctgcatttccctgggggtaattatgtgagaaagctcttaatgttcaagaaaatccacatattttcaattcaccctggctgcagcctggggaatgcattgggggcccagagtagaggcagggagatacgtcaggaggctgatgcagcaagcagtcccggaagatgatgatgggatttggactcagaccaagtagacagccttggatagatttgaaagccattgagagcatgtcctgatttgggtgtggggcaagaggagggattagtcagaaggagggatcagggctactttcgtccttatggctgcaaaatcacctgggttcactgaaatatggaatactagaagaccagatttggggatgaatttggctttgaagactgggatgctttagaactgtgcagatgtttgctacaagacccactgatggggtctgcctggttccgcctcctttcctatttctctaaaaatggaggttgtaaatgatgagtgtaatgaattgatccaatgttcactttcttccttgcctctcgtggatgtgttaatgaacaatgagaaggtgaaaaatggcatcaggagaggaggaatagttctgcccaatatactgatcggaactaagtgagtcttgaccatagatagaccagagcttggcagacacatagagtttagaaaacattgtgttgttaaatttttaaaaaatatttttatatttctattttaatttttttattatactttttctgggacacatgtgcagaacatgaaggtttgttacataggtatacatgtgccatggtggtttgctgcacccatcaacccatcatctaggttttaagccccacatgcattcagtatttgtcctaatgctctccttccccttgcccctcaccctctgacaggccctggtgtgtgatgttccccttcctgtgtccatgtgttctcattgttcaactctcacttatgagtgagaacatgcagggtttggttttctgttcctgtgttagtttgctgagaatgatggtttccagcttcatccatgtccctgtaaaggacatgaactcatccttttttatggctgcatagtattccacagtgtatatatgacacattttctttatccagtctgtcattgatgggcatttgggttggttccaagtctttgctgttgtaaatagtgctgcagtaaacatacgtgtgcatgtgtctttatagtcgaatgatttataatcctttgggtatatacccagtaatgggattgctgggtccaatggtatttctggttctagttccttgaggaattgccacgttgtctttcacagtggttgaactaatttacactcccaccaacaatgtaaaagtgttcctatttctccacatcctctccagcatctgttgtttcctgactttttaatgatcaccattctaactggtgtgagatggtatctcattgtggttttgatttgcatttctttaatgaccagtgataatgagctttttttcatatgtttgttggctgcatacatgtcttcttttgagaagtgtctgttcatatccttcgctcactttttgatggggttgttttttttcttgtaaatttgtttaagttccttgtagattctggatgttagccctctgtcacatggatagattgcaaaaattttcttccattctgtaggttgcctgttcactctgatgagagtttcttttgctgtggagaagctctttagtttaattagatcccatttgtcaattttggcttttgttgccattgtttttggtgttttagtcgtgaagtctttgccatgcctatgtcctgaatggtattacctaggctttcttctagggtttttatggtttgaggttttatatttaagtctttaatctattgtctttcttactcatacttttcaatttccttttttccatgtacagaaaatgaaggttttattgcgaagtttttaggtctaagaagttccgtctgtttttcttttattaaggaaaggattgatggtcttggcattaagcaagtccaataggattttaagagatcttatcttaacagcaaagcactgaaagtcttcaatgacttccacatccagtaaaatgtgtctctgaggttttattgttcacaaagctgcttcagtttttgccaaccgtccactctgaagtcaatctctttgacttcagttctgccgtctgatacttccccaagtgaactttctggggatgcacctcattgctgtattggcaatgtcatttcagctttttcaccctcctgagtgactagagaaagtccagctagcccctccagcatctttacaagccgttcatgtgttgagtggagtctcatttaaccactaaactattatcatgtctgtctccactcagatctgttgtttattgaccagtgctcaataggtttactgtgtgcatagttttttattttgaaggtggggaacttctgttctgacctgcacatacagaatactgaatttgatgtcttggtcgtacacttcagctaaaatcagaattttattctgtctagacaaggttaagaagatgtatatataaccttttgcttgttgctgtgctaactgacatagctgattgtttgaataatttaagccgatcatacagtctgtttatgactgtagcatgtatctgtgaagagctgaccccgtgtgcagtgcagtgttcatgcaggtgagtgtgtttgtaagtgcaggatgggggacacatctctgccctgtacataactcagtttcggtcccagctgcagccaccctgagctggttcccagcaggattagtctttgaggtgggccctcaaagacagggtgggattaatactcagggaatcaaggcaaaggctactttgggagtgtgactgtcagtgctgctgggtcatggaagagtttgaagcatggtggttattatcagaggtgttttcagaagatccttagggagtggtgtttgggaacggtttggttgtgatgggggatgctggagaagggaccagtgaaaacattgtatcagtatcacaaatgattgccggtcagtaaacttgtgaaattgggtctggtcttttttctttctttccttccttccctccctcccttcttccttccttccttccttccttccttccttccttccttccttccttccttccttccttccttccttccttccttccttccttccttccttccttccttccttccttccttccttccttccttccttccttccttccttccttccttcctcctttcctcctttcctcctttccttttattttttttgacagggtcttgcactattgcccaggctggagtgcaatgagggaggagccctcatggcctaaatacctctcaataccatcacattggccattaagtttcaccacctggattttggaggggaagttgtccaggcagcttccaaggcctggagactgtataggaagtttcctggacgttgtcactttctgttgggctgaacttaaagtcatgtggctacatctaactgtgttgggggctggagagagtggtccttgttcaaggctgctgtgcgttggctaaaaatgcacagaaaattagagcaggttttgaggagagctgacagtttttgccacatctacaaaattttggatggggtgggggtgatctaggttgtttattctgtttctaagccactgtagcttctctcactgaattatgcctaccatttgaggagcaaaagggagttttcccatatatcattatgttaggtttgttatggttaacaggactttgttttattcagttaaattgcattgtgtagttgctaactagtgtggaaaatagcaataagcgagagattggtccgttctgctgtctaggaggggacattgactaaggaaaaaagataagtgtaggtgtagcatggtggcttatgcctgtaaacccagcattttgggaggccgaggtgggtagattgcttgaggccagcagttcgagaccagcctggctaacatggtgaaaccctgtctccagtgtaaatacaaaaattagccaggcatggtggcagacacctgtaatcccagctacttgggaggctgaggctggagaatcacttgaaccggagaggcggaggctgcagcgaaccgagatcgtgccatgctttccagcctgggtgacagagtgagactctgtctcaaaataataataataacaataataataggtgattgtgaaaagaagcttataaaatatgttttaagagatagaaaccttttttcttattttggtaaagaacactgacttaagtgatagtgaattaagttgtatgtcaatttgacgtgcacgagggaggagaaggccagttgaatctaagtgactggccagagccagggctgccttcagaggctctgccctgtgtttcctgcctacccttctgggctcacttgcttcctgaaggctgggaatggccttgactttcatgttgccagcatctagcgcggggcttggcacatgatgaggattcatgaaatattcatcagatcatttccaaccaactcccgtgttcaccattagtaacacaaaagtacaacagtagaactatgcaggctgtcaatgcactcagtctcagagcagtattttcggtttatttaggaacaagtatacttgttgaaaaaaattacacagatagttcctaaaattacaaagatagttcatggccatgaactctttacatgtttatttattaaataaatatcatatgctgatgtgaaccgatactttaaatagggttggtaaaatgatctgtaggctgtataaagttttatgttacaaattccatggaagcagtgacttttgtttgtgcttttgtttctgtaatttaaacaatctgtgtttttcccattttctttagacctttttgctacttgatgagatatcacagcgcaaccgtcagctgccgtcagatggtaaaaagatggtgcatgtgcaggattttactgctttttgggataaggtaacatatccttaatgcaagatcatgactgctgaagataatgagtgacattgatttaatagagaattttgaggtgttacacatggtataaaatatggcttgcttatttactgaaactatgttacaaagattctcaaaattaggagtaagttttgcaattaatagaaagtaggtatgaaatcagacttaggtatttgacaagttgtattttatctcattttcaaaaaaccaaggaaagtgttacctcgttctaaactaaatgtcactaagtttggacattggcaacgctggattttataggattggacagactaggggtgcagcatggaatgggttaactgctgagtacattgtagattattacggagactttggggtatcagtgcacattttcagcttagcgttttcaggtcatcttattacatattgagaaagcccatgacttggatttttgccacggggttggggtggggctcccctattccaagcatctggatgttgccagctgctttggtggcagcccaaggccgaggggaggctgcaggccggcgtagcaagctccatggattcctgactgaagggtttcaccgtgtggtaagtggacaggtagttctggcaaggccacaaggatttttcaacacttggtttactcataacatttaggcaaatgggaccaacagcaggggccacccacaagaagtactgaggctcggtgcatctcctgttatccacaactccagtgccctcctcatgcttccaaggaagcagtgggctccctgcccagtgctcatagacgccactactatggcaccagcttttcatgaagagaaaggctgtattgtgagtggaatggcaaggagacaggaggcaacgctcaaatttgtcttccctagctgggggatggggcaggttttataggcagagggtaatgaggcatggtccgattgggtcttgcatgatgccagagctggacctgatcggatcctggatcatgccatgaggcgttcgcctctgaactcgttcctccttccttggtcctagcacttgggttctgcccatggttgcctgcttggttcatctgggaatgctcagattacgtaacttgcaacctgggatccatggtgactgaaaaactgtttactatgttattacacaaagttgaaccagattgggctggttctgcggttacgctcacctgagtccggggtcctctgcaaatgcacttgtctcagtctgtgttagtctggaaaacagaacacacagcatgggagagggaattttgtgcagggaattcgtttcataggtgatgaaagaaagagcacaaagggaaagcaggggtggaggaggccaccccgagatcagccacggcaggaagctgcaccccggggctggagatgatgtctgccaggagcagagcccagtggcccagctgccagcaagatttgggagcagagggcgagggtctcttctgagggtactggaacagctcaggctgcttaaaacaggtgggcagtgctggtggtgaccagctcctcccctctccgggtgctctttgtggctgaccttgcgttgtagcgtagtttgctggagccaagagccaataggcggttgagcagcactcctgcccagccccactgcctccgtcctcccctgtgggacaaatgtcaaaactctctagactccagactcttcctttctctacatgcccttggctctaagtattgcactccctgtttcatgtttgcctaattctgatgtaatttctgccatctctaccaacaaaacaataatgtgttcccagatatttagaacatcatcgcatcttgtgcacatggaaactcacacaaggtgacagtttctctttatctgctggcattcccaccctcatacactttatttatttatttatttgttttggagacagagtcttgctcttttgcctaggctggagtgcagtgctgtgatttcggctcactgtaacctctgtctcccagggtcaagtgattctcctgcctcaacctcgtgagtagctaggattacaggcacgccccaccatgcctggctaatttttgtatttttagtagagacagggtttctcccatgttggccaggctggtcttgaatttctggcctcaagtgatctgcccgccttggcctcccaaagtgctgggattgcaggcatgagccaccgtgcccagctctaatacacttcaagcattgacagacagctctgtgaacatcccactagaaaaaagcactctaggtgaatgctgttgagctagaggaaggcactgaggtagctaccacacactgtgtaggtcccatttgcaaatttcttttgtaccaaaccctgcgatattgtaaaatggtctgttttgttgtttttcggttcctagataacattgacagctgcattgtaaacagaacactccatcctgttttctggccttgtcttggggtgattttgcctcacactggcagggattattagggaggtcctgcggctgagagggtgctggggtgggaggaggggcacagacacgggcttctggagagaagctgcagaggaaagaagggtgtgctgggctgggatttcggagaaagacagagaccccagcagcagtcctgctggatagaccagcaggtattggagggaaggtcttctcaccagcctaggtctcatttataaaacaggggcttgggctgaagctgtaaagtctgtggccccgtgagagcctgtgactctccatggggaagggatttgcttctgctttcttcactgctctggccccagggcccacagagtgggggctcagtctgcctgccttagtgtgtcttggagcctggggaggtcccagagggaatgggcctagccttctgagctgtcgagtgctgcccccttctggctgcagcccaccagtgctgggtcccaggcctcccggcggggcagaaacctgctctaagaaccagggccttgatgggaagctgggttttgcatgtggctcactcttttgcagccaaaactgaataaaaagaagtaaaatcagaagtagttgttaggaaagagacacactgcaaaggaggggaaagggacaggttgaccggttgtgttttttcatccttttgtaatcacagaaataagtaggtttcagttgtcttaagagacagatgttacttaatcaggaatacagagtagacccgttacattttagaggaggaacaccttatatagtaaggcgaagtcaagcaagactttgtgaatttgtgacaagtttgcacttaaaatcgtgtaaatatgtcacattttgtttaacgttatttttccaagtgtttaggtaatgtattacttttttaaaaaagaaatagttgttaggcatgtatgaaggagtaaagaaacctattctgggtggttgttatataattcctatgaaatctggggctaatttctttgtgcttaaaagggatcatgatcgttttggtctgcggccatcctatgatgtggtatgggacacataaggggtcagttttcatacacacatattttagcatttgaccatttatagaaatatttgtgattattcggatatgtgaccattaagtcgtttccaggtaaatttttcattttgaaggttatcttgatctcttattcccccaccgtgctttctgtcttttgggcattttactaattgcacatgcccgcttgagatgtggagaggggttgatgagtaactgtgggctgcgccagctcagtgtctttaggttttgggttggttgactccatgcgtgcttccctcttccatcatcccaggggtgttccacccttcagggacgccagattcattttgaagaatccttttctagagttgaggaggctgcattgcctttgattcattcttgatcatttttctatgatatggatgagcatttaccaaagtgtgtcgtgcagaagaatagccacttccgaaaggatttgggacttgaataaatttgctaaatgcctacccaccagacatgcatggtcaagtctctccaatctatccacgagaaattcagacgaagattataaatgtgctgcttaaacccctttaggattcctcccaaattgtagctgtttttactttacttaacagtatcaatttttgtctactagtgttgatgtctgggtttggacaaaagttcttagagttggcagtttttacggttgaggttctatactctgaatttaaaaccattcctctctttatttgtaccaactgacttttgcttttttaaaagatagataattcaaagtactgattgtccttgtatgagaagaggaaacctcctcattttggtttatcatgctctggtaaactatccctatcatgctctggtaaactatcccttctccctgatacacacttaatcctctcaattgaaaatatttagaagctctttgtaaaagtaatgaatttgatttggtctcctaaataataaactgcaaaataacatttttttgagacaaggtcttactgtgtcacccgggttagagtgcagtggtgcaatcttggctcactgcaacctcagcctccggtgctcaagggatcctcctgcctcatcctcctgagtagctgggactatggcacacaccatgcctggctgatttttttttctttaagagatggtttctcactatgttgccccagcttgtcttgaactcctaggctcaagtgatcctcccacctccatctcccaaaatgttgggattacaggcatgaaccagtccgtaccctgcctaaaacaacttttttttttttaacattagcagtgattgataattttgttaacatttagtatatgtaaaaacatgcatatactcctgaatctttttatcatagaatttatagattgtttaggaacattatttctgataccctaatgagtacttcatcccttcctccctttgtgctggattgaatgctgtggtgggtacctcagtgtttatagtagaactactatgctgtccctattttcccaggatgggtaacacaagctgcaggtgtaacactgagactttcactttgacctatgaacatacacttaatttcattattcttcagtttttggttattgttaaattagagctcttggttacagggttgaccaccatttgtagaagttcatttgccaagagtgactttatagtataaagtgccttctggctggctgggcataactgaggttcatgctttatcaagtgaaaatggaaagattagtggagatttcaagtcatccattagccaaggactgggcatgccatgtactcatgctgccaccttgtggaggttaatgaaatagaatattaaaaccaagggacagaatgaaaatttacaaatggttgaaaagctcccatactgaatattatattaagaatattgccgggcgcggtggctcacgcctgtaatcccagcactttgggaggccgaggcgggcggatcacgaggtcaggagatcgagaccacggtgaaaccccgtctctactaaaaatacaaaaaattagctgggcgcagtggcaggcgcctgtagtcccagctactcgggaggctgaggcaggagaatggcgtgaacccggaaggcggagcttgcagtgagcggagatcgcgccacagcactcccgcctgggcgacagaacgagactccgtctcaaaaaaaaaaaaaaaaaaaaaaaaaaagaatattgttttaaatgagaacacatggacacagggaggggaacattacacatacggggcttgtcggtgggtggggggcaaggggagggagagcattaggacaaatacataatgcatgcagggcttaaaacctagatgacaggttgacaggtgcagcaaaccaccatggcacatgtatacctatgtaacaaacctgcacgttctgcgcatgtatcctagaacttaaagtaaaaaatatatatatattgttttagtaagttagcatgagttttcatttcaagaagcttgtcttgtcatttttactatctaaattttgtggaagtctggagctgtgttcacatgaaaatctggtaaaagggaatgggccttccttaagtactgaagactccaaactgtgtaaaaccccaccaaaaaaatatgattgtatgaaaaggactctaggatacaatatcttaaaataggaaggagaaagatttgggttatgttcatgtatcaatgactgttgtattgttttcttctctttttgaagtgatttgtgtgactttattgaaatgggcacattttataaactttaatttgtaggcatcagagaccccaactctacaaggcctttcctttactgtcagacctggcgaattgttagctgtggtcggccccgtgggagcagggaaggtgagttagaatggcttttggcagcttgttgcaaccccacttatcatattaacttcgtgggtttgagcccaaggctacgtgtaacacaattttgaactgggtacacttggcacggcatttctcagtgcatggaacattcgttttgcaagaagggtcacatgaccaaataaatgtggacaatgcatatcatgtttcccttggttcttcaagttgagcaattgggaactcctagaagttggacatctccatgaaagaaattatttatgtgaccactatgcaggatggattgactaagaaagtgggaacttctttttgtcagaggggaccctagatgctacaagacatctggaggttatgaaggcttgtctgaaaagctttaaacatgttttgatatgacttctccaagtcacatgaacacacatttaataaacctgtagccaggtgtatagtcctgtgttaggagtaaaagatacacctgtaatcaagacccagacgccactgccctccagaagtttctggtatctggggtgagacagatatacaaacaggtgatttcagttcagtgtcgtaagtgctctgatagtggggggcacagacacgtcatgtctgtgcattgtagaagatgtgaaggaaacgtgcgtacagacttagtctcatatattctaaagcaacgcaataaatctagttgtaggtgtataacaaatagggtggtttaacaattgaagtttgctcttcagagacacgattcttgggtatttaaaaataaaagtccttcctagtgcacaggatttattatttatttttatttattcattcatttattcacgtatgtatgtatatttagtttttgagacatggtctcgctctgtcacccaggctggagtgcagtggcgtgatctagagtcactgcaacctccatttccctaggttcaagtgattctcatgcctcagcctcccaagtagctgggattacaggcgtgccaccatgcccggctaatgtttgtagttttagtagagatggggtttcaccatgttggccaggctggtctcgaactcctggcctcaagtcatccacccgcctcggcctcccaaagtgctgggattacaggcgtgagccactgcacctggccaggatatgttatttacatacagcatttctaggattagttctttgtcaaaaaagatacccgcatgcaggaacaatgcattcagtattggatatatgaactatatatgtcatgcttggctactctgttgctgtaaacattcttagttgatctttgttccgtgtaccatttcatttaggggcatgaaactcatttagggaaactcattagggcagagtagattgttacactctattttgttaatattccttataaactactagtttatgtggaccattatgttatttccaatttttaatcacaacttcctgtgctcttttaaatgaatgaatggtgtttttcaagctcccagggctgggcaaggctgcattgcagtggcttattcttgtctcgagtgttgactgaacatgtgcttttttacaatctgtttcagtcatcactgttaagtgccgtgctcggggaattggccccaagtcacgggctggtcagcgtgcatggaagaattgcctatgtgtctcagcagccctgggtgttctcgggaactctgaggagtaatattttatttgggaagaaatacgaaaaggaacgatatgaaaaagtcataaaggcttgtgctctgaaaaaggtgagtgatgacttttggatttcatgtactcgaatgtccagtaatactagtgttcacttgaacaacaaggtttattaacttttttttaatttttaaagacctttgaatgttatttaatactttaaggcggtcctcccagtaaataaacacacacacgctctgtccttttacgtctgatgcgaaaatgatgtttacagggtgaatttcgggggtttggttggttttgtgaagttttatttacttttaacttttctttttttcaaaatggacaattataaaaatttgcaaaagtggagagaagggtgtcttgaacctgcctgtacccattgctcaagttcaagtgcgatcaacttgtagccaattcaactccgtctctcccctggccctctgctagctccacccccaacccagattcttctgatgcatacccttggcctcaattgtattttatctgtaattgtattttatctgtaataccttattacttatctctagaagataagaacacttttgaaaaaaaattacatctcactcaagaaaaaaaatcaccagaatttcttgctatcatcaaccggctaggcagagattacagtgctttagtatctcattacccattggtttgcgtcagactccggaagatgtctgcaccgtgcacttggctgatgtttcctgcttgggtccctctcaaaccacaggtttccttctccactccctttaaaaaagaaaatttgtttcagtagattttggggtacgggtggtttttggttacatggataaatttacagtgcaatttattatttaaaggaaactgttttaaaatttatttttcattgtgtatcatttcaccaagagagtgattgttttcagaaaagatgaagtgtttgattgtacactgaggttttcataaacctggtggatagttgatgaaaactgagcatacttaatagagggctataagttctagaagatagaaaaaatggtaaatactgataaatactatgttaccttctttgggccataaaaatcagtgaataatggcattaaagggctctccccaggccctgtgcagtgtggcctggacatcctactgttcttttatgctgtctggaaaaggccgccacagactgtcacaggtgtgatgcagaaggcttccagccaggtttgtgaggaatgagtaattttgcttgaacaatggctggaatatcagagtctgtcaatcaggtgagtagtatttgctggcgatttggatagagaaatcattgcttgtttaatgggctgtttcttcatcctggactattgttaatgagagatgatgcattttcggaaatgacattaagttagcagtaatgagctagatttttattgaatagtatacactatataggaaaagatgcgctaaggcaagctcctagttattcagatcctaccaggtcttatttttttttctctgtctcacacgctcacacatatgcacacacaaagctgtgtaaagttttaatcttttgccatgatttcccagtgcctttgctattgctatcctcattttgtttatttttctgatattgctagcctcgcttttttaaagtaaaattttcattttattcaaagtttgtacagaattgctaacatttccctaaaataattactatacttcagcttgtcctgctctggtgtccccccactgtcccctgcttccctgaagatccattttagagaaattttgcagaaatatagggtcaaagtaggagaatatacaaggtgatttcagtgtgttgcagtgagtggagtgtatcatgttttagggagttgagaaacagatggcaaattttgctagttttcccccactggtagttacagttgataaccaagaaactgctgatggaccaggccccggagataggaaagatggtacgccatttttcaatggaagggtggcacttggcaacctgggccttgtctttcagctcttttcttccatcatttctctatgacaggttagaagtgaggtccttgggaccaacacagggctttcttgggaaggctttgttgctctttacctactaatctgtcagtttggagataacctactagtaaactctagaatttaagaatgatttgttcaagactgtggtttcaagagttgaatgttgcttctggctggtaaagtggagggttggagagataaaatgactcacttgaacatttgcagttcaagttcaaagccatacctgcctagctccagattccattttcccctctgccaggcacctctcagttgggggtgtttataaggtagaaaactattttaacaattaggtgattgataaaaaggtagaatgtgggacaaaatgtttttcaagccttccctttttacctgttcagcttctgatacccacatgagactccaggtcccaggtcacccagctctgccttgctccttcccacatcagaaagtctctgggggaaagtgggggttaggacagtggctgccattcagcctcttccgtagccacctttgaggactggcccagtaactcggatagtgtcccaggcacctgcgggcttctgcgtggcaggcagactccagtggcaatggggtcccctcagggctgggctgcatggcgacttcttggttccttcctggatgtgtgtaagcatggactgctggccccctgtgcatggttccatcctcggtaggacggtgggcctccggtggtggagaagtcgaacagagcaggagtctggcccagctttgtcatttgctcgctgtcactttgggttttttttgagatggagtctcgctctgtcacccaggctggagtctaatggtgtaatctcgcctcattgcaacctccgcctcccaggctccagtgattctcctgcctcagcctcctgagtaactggggtcacaggtgtgcgccaccatgcctggctaatttttttgtacttttagtagagatggggttttgctgtgttgaccagctggtcttgaactcttgacctcaagtgatccacctgcttttgcttcccaaaatgctgggattatttgcatgagccactgcgcacgaccagctcggtgtccactttggacttgtcacattacttgccttgggcttttgatgtctctgctgagaaataaggacatgggatgagatggtttccaagaaattttgctaccattctcaaatgccatttatgactgtttagcaggggactggaagaaaccagggatcctcttaatgagttatgagatcatttgccgactccttttcaaatccacgtgtcaatggtgggtgttagatggccatagagaatagcaatactggaattattctggcttgtaggtacagagattgcatgtgtaatcaaaacctgctggacagaaatggtcctgagcgtctctgggtgtttggcctctgtttcatttcttattaaatgggggagatacagcaggattataaagactgcaggcaatgtctgtaaaatgcaaacatgccaggtttttggtaaatagtagctgttgcccttttctctaaatcagttaataagataaataaaagattttgccttatatagttcctcattcccctcctggccaccctcccccgcaaaaaaaaaaaaaaaagtcctagaggaaaaaataggaactaacaagatttctcagatatgttgatagcaactagatatattgtactagatacagttgaagtaaatttataagttcatcgagctaaaaatatatttgagataaaataataagataggaagtagtaattcacatttagcagtattgctttaggctaattatttattcaaagagatatcgtagcaaatgacaggacatacctcaggaaacaacatactaatgttagatactttagtgggtagtagttaaaatccgaggccttggggtcagacagctctgggattgagtctcagttcctcttcagtaggtgtgtgattttagctaatcgtctgaaccttagaaagcctcagttttgtcatctgtaaaatagagataataaactattcacctcataggctattgtgaggataagatttgatcatgaacttaaagcatctgattactaggcacataacaggccttcttaattataagagccaccaattttgggtaaaatcacatgaaatgtgacatgcttgaaagaatgtatctgagtatataacttccattatttgaattgatatttatatagggtttctatacatagtacagtaaataagagaataataaaaatattgttaccctaatagatgcaatgtattaatattatgtcaccctttgcatagtttcttttaatccttgagcacttttaagcagtgtgtatccaaaaaggcatggaattgataaattggagtttaatgtttttctatatagctcacttgactctacaaacccctttggtgtacccactatcttataatttcttctcatatttgccacattcctgccaacttggacattttctttttagattgccttgacaatcataaaataactgttgttatgcctttttgttgttgttgttaatctctcagttgggagaaccatatcactccttagtgacataataggaaataaatgctgagggcccggcgtggtggctcaaacctgtaatcccagtactttgggtagctgaggtgggaggattgcttgaggccaggagtatgagaccagcctaggcaacatagcaagaccctgtctttttttttaaagctgagtacaaaagggatacaatgaggtgaatctaactagggtgactaaatgaactgatagtgctgtatatggatagagagacttcgagttctgagttgtttcagtattgcctttaagtaacttctagcaagcacttggggaagcatgatatgaaagggcaacaggctgtgaactgagatgagcttggttcagactccagccttcctttattaactgagagtcctcagtccagttacgtgctctcacttcatctcagtctcctcatctgtgaagtgtggtcactacttacttggcaggttgtcatgaaggttagagataacaccaggcatcaggaacagtggttggtgcatagctcttacatccaggagctgacctgtggagcaagaagctgagtacacacataaacattaagaggcagaatatggcaggtccttcctaagaaatataaacaaagccttaggaacctagaagagagagtgatgttttctgattgggggactgcaggttagtttcatagaagagtttgagctgggccctgaaagaagaataggatgttgataagctatgacaggaagggccattccaaatggaagcaaggtgtggcccaaagctggagagccctgctctctgactctggggcctcttcttgtgctggggcctcaggcctggcccctgtgaccatccccatagtgtcctcagtggtctttctgcctttagtgtcaccatggttgatgtgcacatggtaggattctggttagatggcgtcaaacccacatagccacgtcatggtttttctctagtttctgtgtctgcatttcagtaaaggtggtggtagattaaataattggttaattttactgagtggtacctaacgtgcatgagataccttcctcccattgggagcacttctgctttctgctcaactgtttccctttagccaaactagaaaatcatggctaggaaattagcctgactcagattgtacttcagatcctttgaaatattttccctgtctgaggcgtgtccataaatagtttgccaagtcaacaacactcaaggtcgttgtagtactcaaagtgctactaccaggcatggggagagagctccttccctattccctgtctgcatgaaatgagacagatatttttagtgtcttttctagaaaatggctaagattgctctgctacaacttgatgctattttgagaatgaaaacaaaacaatgtaaaatcaaggcacagaaacttaacacattatataaagaccatcagcaatggaatgaggccaagtaaacaatgtgtgtttgtgtttgtgtggaaggctgggaccctgtcttaaaatggtgcattgtctttttatgaaaactgaaaggaagagatagtgttaactggtgcattgtctttttttttttgagatggagtttcactcttgttgcccaggctggagtgcaatggtgcgatctcgctcactgcaacctttgcctcccaggttcaagcgattctcctgccttagcctctcaagtagctgggattacaggcatgcacccccatgcctggctaattttgtatgtttagtagagacggagtttcaccatgttggccaggctggtcttgaactcctgacctcaggtgatccacccgtgtcggcctcccaaattgctgggattacaggcgtgagccaccgtgcctggccgcgttgtctttttatgaaaactgaaaggaagagatagtgtaacttctgagctcaacaaagagataacgtgaaataatgaattttcataatggggcacttgctacctttcatttgatgccatctggttcagattggagtattaggggactcctgtgtgtcttagtgggctgccagggagtgggttccaatggaaatactgtttttttccatttggtgatgtactttatttagtgggattcatgctatgaatggggtcctgctgttggtttgatcagaaaatatgtcatagtcatcaatagcaaatgataatgaactcagatccttttttcacttagagagttcatacccttactttagattgttccggcattctatgagtttattaattcttgtttctccaggatattttgtaaaagagataaaatgagaacttagggaggtcagaggatttgcttgtcatggagatctcaatgtgccatttgctttgtctccccggctttgtcagagtagagacaaagaaatgacaccttgatctgtaagagggctatctctgtagtgtcctaggttgatgcttatgcagctcagtcaatacccagcgatgttctccacaccttttgtctatgctaggatctgtctagtgataattataggccatccaagtaaagatttctaatgtaatgtcctgtaacttaaacctgatcattatcctgttattttcagggatgttcttgtcatgttttttaaaaaaagtattatgctttgtcaacttatttcttaaataatttttaaatataactttggttggatcctcaaataaaaacttgttttccttcctagcttttgttttttggggtcttgcatggagccagagtctacttagtgcaaccagtctgtgcagtgtctcatgagcactctgctcctttccctttggcttttcctgactgggctgctctttctgctcttattctttgcagttttttttctgtcagtctattgtgatgccttaagcatcactgtgaagatggggcgggtgttatcccttctctgagaatggaaagctgaggcaaaagtcgcaaaatggcttgtgaagacacagttgttccttagtaagtcccgtggctttatgctgacagccctcacggttgggtctccagcacagacctccagactcacttatccagccgcaagtcaggatagccggtcagcatttcagtttggccataatcaaccttttgattttatctcttgaatctgcgtccctcatttcccccagctcagtaaatggtaaccctgttcttcccttgtcttacaccaaaaccaatgcagtcctcctctttttctatcacaacacaaacccatctcatcagcagatcctataggtgctacctttaaaatttgttcagcacatgaccactgatgttcacttccttgttccccactccggtcccggctactgttgtttcttgtctcaattattgccttgatcagatcatgtccttcctcctatttccctgggtgtgagcccttggcttctcttgcctctgtctctgccctcccctgccatcatcctgtgctcgcagttccgtgtgcatccatattgctcttctgtgaacaccttgggcacgtatcaccccatgggttttgtgcttgctcattcctctatggagcactcttcctgcactctgtgccagccagtccatcccctgacaggtctctgctcagaccccctcgatcagagcccttgttgacctccctatataaagtggactttccctctgtcactctgtctccctaagccagcttccttctccttcttagcacttatcacctcttacatttgtgtcaatcttttattgtcaggtcactcactgtggaaactctttcgctgctgaattcacaaggagttgctgctcaaaaaatttctgttaaaatggctcagtgcataaatgctatgaaaagctacagcattaaaatagataacgtgccctgactgtgtatttgataggttcaaacttacaatttagttactatgaaatatttccattgctgttgatcaaatacatgtaaatttctgaagaactaatgtgcaaagtttaggataactttggaagaacacaaagaacagaggaagaacatgttttaagtctctttttccccccttctttcctttgtccatacaggatttacagctgttggaggatggtgatctgactgtgataggagatcggggaaccacgctgagtggagggcagaaagcacgggtaaaccttgcaaggtaagttgcatttcagcagccactatgccggtgtcttttgataccttccagtggtggtgagcacataggacctgcttactgtgtattgcgtcctgtgtgaagcaccttcttgggttattctgttggcatttgaatgaacatcccagttgttgaaagttgtcatgttcctgggtgagagtctgatacctctttgtattttctagagcagtgtatcaagatgctgacatctatctcctggacgatcctctcagtgcagtagatgcggaagttagcagacacttgttcgaactgtgagtgtgtttgtgtcttaagtcatttctgcttttccagagccatttcgagttggctcaggaaagcctttatggctttcagctcatcctactctggtgtccgctcccctccccacactgtcccctgcttccctgaagatccattttagagaaattttgcagaaatacaaggtcaaggtaggaaaatacacaaagtgatttcagtgtgttgcagtgagtggagtgtatcatgttttagggagttgagaaacagatggcaaattttgcaagttttcccctactagtaattacagttgataaccaagaaactgctgatggaccaggccccggagataggaaagatggtactccatttttcaatggaagggtggcacttggcaacctgagccttgtctttcagctcttttcctccatcatttctctatgacaggttagaagtgacgtccttgggaccaacatagggctttcttgggaaggctttgttgctctttacatactaatctgtcagtttggagataacctactagtaaaatctagaatttaagaatgatttgctccatagtagactgtggtttcaagaatctaatgttgcttcatggattcttaccagagtgaacacttaaaacccacaggcatgtaggcctggcttgcctttgaaactagttgtctagaatctggcttccctcccaactcttacgtggtgtttctgggattttctttctttggctcttgcttagacactgagccatggaggtagaactactctggaatcttttctgtatattctataaactcatgtgtgccgactgacacttcctacatagtctagactggcctttttgaaagcattgtgaactggttttgccaaaacagcactcacatctgccccacagtcagcttcctgtttttcgccttgttaaagtcagtgagcctttcccactcattgtaacccttctgcgcacactgaggtagatgctcctgcagatgctactgcatgaaacatcttcgcttgcagaggagggcagtcagccacagagaagataagcacccatgctgggctgagtgagagagagacaagttcagatttcattcttgcccataaggaatttgtctctgcatggatcaagactaagtgcatgggaaaagttcaacagaccccaaggcttaggggatttcaatataggacaatctattttattattattttttttttagataggatctcgctctgttgcccaggctggagtgcagtggtgcattctcagctcactgcagcctcgacctcctgggttcaagagattctcctgcctcagcctcccgggtagctgtgactacaggctagcaccaccatgcccagctcattcagtgtttttttgaagagagggggctttgccatgttgtctaggctggtctccctatgttgcccaggctggtctcgaactcctgggctcaagggatccaccccccccccccccccccccctgccctcggcttcctggagtgctgagattacaggtgtgagcccctacacctggcatacgacaatctttttttttaaatggaagaagtgggcagcagagattggaaaggtcactgagggccgggcttggctggaagtagcctgtggtcctgcaggctggtaagggtttgtggtggctgagagtaggattcaattcctttgaaagaaatagtagaagcagaggtgtgcagacgggaaggagtgaggcctgtgggaaggacagcaggcaggcacctgttcctgtggtgggggatagagaaggtaccgtgagagaaagctctggaagtcctgtgttggccagccagggctgccctcacaaaatgccacaggctggggggcttccacagcggcaggttgtttctgcagagttctggagactgcatgtgtgagatcaatgcatctgcaggtgcagctcctcccgagggctttcttggcctgctgatggctgccttctcacccttttctccttgtgtctctgtatccaaatctcctcttcctgaaaagacaccagtcagattagagtagggcccaccctcatggcctcattttagtgtaattacttctctaaaggttctgtgttggccgggcactgtggcccatgcctgtaatcccagcactttgggaagccgaggcaggcagatcacctgaggagttcgagaccagcctggccaacgttgtgaaaccccatctctactaaaaatacaaaaatcagtggtggatggtggcgggtgcctgtaatcccagctactctggaggctgaggcaggagaattgcttgaacccaggaggtggaggttgcagtgagccgagatagcgccattgcactccagcctggatgacgagtgagattctgtctcaaaaataataataataaaaaaaaaattttaaaaaaggttctctgttcaatttctaaggtgctagggtgagggctggaacataggaactttgaggggagcatggttcagtccataacaagtcctggatagcaaagtggatagcgagtcggctgtgtgagagtaactcatctctgggctctggattccaggggtttggacatgaagtcatccactgagcatggggctctacgtgggttcctgaacgtttacccaccagagtgcgtatgcaaaatgtgcctggtatgggatgatgaagtggatgtgtatgatggtgatggttgcacaatggtgtgtatgtacttagcgcgaccaagctatacaattaaaaatggtgtaaatggtaaatgttatgtcttgtctatttttccacaaccaaaaaaaacgtggatggcagcattgaatctttctgaatgcagagtgcaggataagctggcacttggcattgccgcagcagtctgatcagagcctcgtttcctgctccctcctcattgtgccttgatgaattttccatttcgccgagaagggcctctgtggcttgcttgagtcttgcgcgaggccccaccagttctttatcactcaaacaacaattcccggtgggacgctgtttagagtcgccgcggggaaggaggaaggtattttcattgctgagtatcagtgtgcgtatcgcacaagctccctcagattttcatttgaacacaggaggtatttataaagtcctcttgcacctttaaggattaatgactttggatatatgcttgttagaagcaagcttgttaaaattgttgtttgctaatcagaatcacattctttggggaaacttagggcagggagcacgaatgcaatttaggaaatcactcagcagcaactggagaatgttctcaacgagttagaaaattggattgaacaatatgctatgaaagatggcggttgtgttgaagcttagaaatgtgaagtgttttgtattaaaagtgaatgaattacgcttctatttgccattaacagttttacttcaatcatgaatatatatcgagagttgttaagagttgtgttttacaactatatgttgcaaacactaagtggattttatcacatacaaaaagtgagggtcacttagattaaaggatgctaatccaatttgttgcctgctatagatgtggttgtgttctagaaagcctcaaattctcagacccctgcctctttgagtctcctaatcagatctcccacactgttgcctacctatttgtcttagtccattcaggctgctgattcaaaatagcataaactaggtactccatataaacaatagaaaattgtttctacagttctggaggacaagattcaagatcaaggcgccagcagttttggtgcctggagagggctcacgctctggttcatagacagctgtcttgtcactgtggaaggggtacggcagcttccctgggctggccccttctactaataccatttgtgttggcagattctcatgaaataggcctcacctcctaataccattacattggtgattagggttcagtaggaatttggggagggccacaaacattcaggcacagcactagttcaccttccctctttcaggtcctctaggactcccctacttttaagctacagttctaagtcctcgaatggcaaattgccctttgcagtctgccccattcacctttccaacccttgccatgcaagaccagtcctccagccatgcacacttctttggggtgcctggaaggaggtgtgaatttctcacgtctgcctgtctgtaagggtatttttcctgccgttggacaaccagggatagtttgcctgggcaaaagagaaaaatgaaagacacagatcctacctcctgcctttctcttctgctcctcggagggcatggcgctttctctgtcttcccacagccctcaatgagctgctcttgatccacctatgtgttcttccctccagcccccgcactagactgcgaatgcatgaaggtgcctttgcacagcgcatttgtgccccgggaccattgcacctgctgtatctgccaggaatgcttcccccagatagtctcatggctcatacatcacctccttgcagagaggactttcctggccactccctctaaagtacaacctttgcctggctgtctcttcatggtttactttactatccaatagtgtgttttctgtgtttgtgtagtgagtgtccctacacgactcagggtgttgtctgtttgcttgaccagtggatgtatcctcatcacttagagtagtccctggtacttcgtcagtgctcagcaaatgtatcttaactgaatgaatgaaggtagtgactgtatctgtccctctctccctccctccatcccttccttccttttttgacagagttttgccctgtcacccaggctgaagtgcaatggcatgatcacggcccactgcaacttctacctcctgggctcaagtgatcctcccgagtagctgggactacaagtgcacaccaccactcctggctaagtttcgtgtttttttgtagagatgggatctctccatgttgcccagactggcctttaactcctgggttcaaaagatcctcctgccttaacctcccaaagtgctgggattataggtgtgagccactgcaccaactgactatatctttctcacttgtgtcacctccaacattgtatgtgtcagctcttaatgttgtcttttttttttttttttcctttttgaggcagagtctcgctctgttgcccaggctggagtgcagtggcatgatcttggatcactgcaggcctcctgggttccagcaattcttgtgcctcagccagccgagtagctgggattacaggcatgggtgaccacatccagctaatttttgtatttttagtggagatgggatttcaccgtgttgcttgaactcccgacctcaagtgatctgtctgcctcagccttccaaagtgctggaattataggcgtgagcccccgtggctggcctcttaatgtagtctttatgtaggattagagttaaatagctcattgctacatcaatcacttattatttgtttgttttatggcatgactggaagatttttactcttaataatttggaaagtattttttgagatttgcctaagaagcataatttagaaaaaatttcaagccatcaattacaatgttagtgtaattatttctattatctcatctacaatggaagatgttaggaagaaaacattttgaaacctttgagttggctgatactggacatagcacccatcagatttgatcattaacatctccctttagatatgtatataaaaggactaatggcagccaatcttgatataaagggaaacagtttcattaaaagctttagtactaaacctgaagaggggtataagtactaaacctgaagaggtatactagattgaacaacttagttttgaaataagccaaactaagatatgtgaaaggggaaaaaataatccttttggacgtaaaggatgaagtgatagtttacatatctgcagtctggagttgtggttctgatcacaggcactgtctctaaaatacttgcttatgacttctcagtcctgaatttctaaaagcagtggctgcatatgaggaagactggaggacagggctaacacttattgagcatgagttatgttcttggcccttgttacagattaatgcttttcttttctttttcttttttttttttctcctttttttctttttgagacagggtcttactctgtcaaccaggctggagtgcagtggtgtgatgacggctcactgtagcctcacctcctgggctcaagtgattctcccaccttagcctcccttctagctgggactacaggtgtgtgccaccacacccggctaattttttttttttgtagctcccaggagtctacgtttacaatgtaggagaactttgagtgggtaccgtagaaaacaaacaaacgtcagaaaacttgatggttgaatactgaggtgggtcttatctttgagccatatggtttggactgtttggattctgtttttccattttcttattcagactgtttaggactaatgagagaagttttgcttcctggatgagaccaagaatactgtggagagtcacatgtcactagcatttgttttcgtatctagtattatttttgaagaagagtctggaaaatgcactctggcaaaggttaccaagaatctaagcctttttgcggggggtggagggggggcgttgatatgtgcattataaattatcatctaagaaaccgtccaagaaaaatgccgcgtcgttacgtgacctcgatctttctttctcccctgcaatcctacacggcaataaaataattagtgttttagttaagtcaaatttttgaatgtctatgttaaactaagttttaggaaaaaaaattacacttattgcctccttcccagaaaacttttgaggatttcaccacagcaaggctcgtatttgctgctagtggttttgaggacctagccggctttattggcttatatttgtatttagtttgtatttaacctctagatctttgactactgtgttgtctttgactacggtttcaaaatgtatgtttttcaatgtggagcaccccattcatgcattttttcaccctgtgccttttacatttataggtgtatttgtcaaattttgcatgagaagatcacaattttagtgactcatcagttgcagtacctcaaagctgcaagtcagattctgatattgaaagatgtaagtagtttctagaggtctcccgaacttgcaagtacttgggtgtgttgaatccccttcttcttcctccatttcatgttcctttcttctcagagctgggattcatgtttttaagtattaactcaaaagacttgtagaaatgtcattattacatgctaaaccatattaccgtaaagtatgtaaaattgctacctcaaggttactacattgttaaagaaaatgatgctgttttaatttagaactttttgtttacctcttccatgacttaattcaaattgtattatttggaaattacagactctaagacctgtttgtatccctttaattgtcatgcatagtttggctaaagatcctcttctattaatagcagaaatggctgggcacagtgactcaggcctgtaatcccagcactttgggaggccgaggcaggcagatcacctgacgtcaggagttcaagaccagcctgtctaacacggtgaaaccccgtctctactaaaaatacaaaaaattagcccagcatgatggtgcacacttgtagtcccagctactcaggaggctgaggcaggggaatcacttgaacccgggaggcggaggttgtagtgagccgagatcatgccgttgcactccagcctgggctacagagtgagactctgtctcaaaaaaataaaaattaaaaaataataataatagcagcaacacagttggataactgagcaacccctagtcacagcacccactttcctggaatagccagcagttagtgtcactgcacaggaatttttgagtgcctgatatgtgtgagagctggtatagctataagtaagacaaagtccttgccatcgtcgggctgacattcttcctggagatagatgcaaggaaggaaatggaggggtggggttgcctcgctgggacttgaggtacagtgacgtgaaggtgctgaccatgcggtcacctggggagggcatctgaggcaggggactggcagtggggtcctaaagctggaagttacctggtgcatttacaggaacatcagggaggagcagagcaagccagggagagcctggagaaaggtgggctcagagcagttgtcagaggccctggaactaggacagaggctactggacagtccagagcagtggagtgacatggtttgatctgtgattttaagagatcctctttgttgttggctggaggagctacagcagaagtaatttgaagtcttagtggttcacaagacagaaataaggggttggtctagtgtgtcagtttcctagggctgccagaacaaagtgccacacattaggcagcttacaacaacagaaatgtattgtctcactgttctgaggctgcaagtccaaaatcaaggtgtccgcagggccgcgctctctgaaggcttcaggggagaatccttcctcgcctctcccactttctggggttttgctggcactcactgttgatccttggctggcagtgcagcccttcagtctctgcctctgttgtcacatggcattgtcgctgtgtctctctggctttcttcctataaggacatcagtcactggacctagggcccaccctactccagtatgacctcatcttgtcttgattgtatctgcaaaaatccagttttgaaaaaaaaggccacattcacaggtaacaggatttaggactcgaacatatctttttagggggtcatggtcaccattcaacctataagagctagcgtggccggggacatggaggttagtgagaacttctcagcccagcggtggtttcatgcagcactccttggcttgttgcctcttgcctcagtaccctggtccttaacccttctctgttccaggccctggtcaaattcctgattgtgggtctgaaacccgcttagtgtcttcaaatgttttaatgtttctcctcctgcaatttcttaataaaacgatggaaataacaaaaacgagtgttaattatattttataagatctgtgtgcaccgttctccaagggagataaatttcacattattgcaacaaacggggtatataatgatagcaaagctcttgcaagtcttgtgtgtaagcccctccttgctgcctaaagaacagtgaggaatctgtccactgaagtcccggcaagtgaattctcacccttaagaggattatcgaaggcagaactgctgcctcttcagaagtggttccgtgtgctggctcttccccactcccccaggaatagggagcctgggttcctcaaacttgaaaacaagtaatttcttatgcagagggctgagactagtgtggcaaaacctgaatgctggtacattagagtaaagtctgtgggtggtagaataatctttctccaaaacaaccatttggcgaggcgcggtggctcatgcctgtaatcccagcaatttgggaggtcagggtgtcggggggaatcacttgaggtcaggagtttgagaccaacctggccaacatggtgaaaacccatctctaccgaaaatacaaaaaaattggctgggcctggtggcgctgcctgtgatcccagctactcaggagcctgaggcaggagaatcacttgaacctgggaggcgaaggttgcagtgagccgagatcgcgccattgcactccagcctgggcaacagactgagaccctaccacacacacacaaaccatttttccactggtgggcacccaggatgaatgtgtgtccattcttgcttcttgctgtcgacccagccccttccctaacagcagacagagcacggttccccctcggaacccactctgcattgctcctcagtactcggcttctgaggaaaattgccatctcagtaccagtaggagtttccttgtgtgtcttacagatactatgtgaaaagtggtcattttatcaaactaggtgtgtcacttttacctcctgtgtggaagaagacacaatgtatcatgaagcatttttgaattctccagttatcaaactggtccaaagggcccaaggtgtcgttggattttcctcagtggacccaccttttgggggtggggaggattggggtagcagggagggtcctggccaccttcccccacctgacttgccttagccaggagctgctctcctttgatttgttttgtattctgggagtttgcctaatattttgtttgctgctgtttgaggaaatcagttgggtctcatttcatggggtacacaaatagtaaagatatttgtacattattttctatgactttgtaaggagagaaaactgtgcaaggttgtgtcccatggaatgtcgaattttcagttaggaactccctgagtctttggggcaattatttatttatttatttatttatttatttatttatttatttatgagatggagtttcgctcttgtcatccaggctggagtgcagtggcttgatctctgctcactgcaacctccgccttctgggttcaagtgattctcctgcctcagcctcccgagtagctaggattacagatgcccggctaatttttttgtatttttagtagaggtggggtttcatcatgttggccaggctagtctcgaactcctgacctcaggtgatccacctgccttggtcttccaaagtgctgggatttcaggtgtgagccactgcacctggcctgtggggcaattttagagtaaagaccgtgaaggtgcagttcatggggtctatgtccaagtctggttcccacacgcctttttccagcagggcccatggccagtggaggcttgtggagtgcttcctacctgtgcagatatgcctgttcctacctccctatcagtgttaggtttctttcctggaatatcctcctcaatttactcattccttcaattcttattgcataaggtttatcacagttttcatgttctgtaataagactaccaatacggtcaccaacatctgtgtgataataatcgccatttgtaacacactattaccattttaaaaatattcttcaggacctaacacagagtctggctgagaacagaacactcagttgtgtatcaagttgaattgtattagatttgtcaactaggattccggacctaagtataatcataacttaagatcagttactttttctggattagaattagattaggttaacattatcacctgcacatgtatctctctgaaattctttatttttattttagggtaaaatggtgcagaaggggacttacactgagttcctaaaatctggtatagattttggctcccttttaaagaaggataatgaggaaagtgaacaacctccagttccaggaactcccacactaaggaatcgtaccttctcagagtcttcggtttggtctcaacaatcttctagaccctccttgaaagatggtgctctggagagccaagatgtgagttcacctcctgttacaacatggcctggttttgttcactgttaatggccttatggatctttggtctactctgttcaaagcttcatcttttgtcccaaagtggattctgtggtttcagggctctattccatgatattggtagattaaaacggaaccaaggcaaaccaccctggttggagttatcctttgtatgtaggctggggaatgtcaaggaggtgagtagcgggtgtgtatgctggtgcaagtcctaagctgtgtgtgactcacactaatactacaattcttgaatttactgtagtgaaatcctacttagtctggtggcccccgacttctctttgcatctggaggcataatttgaagacccccttagagaaagtcctgctgtgggccacatgaaattagccacttttcctgtatgttggaatgttctgatgctgcaggtggctgatggaggtattttgccctgttgtcagatggtttatgttagttaggccagaagtagcatgtgcaaagacccaacagttcctgacacacagcagcccaacttccttctttacctttcaagaataggagctgcatcttactcaccttggtgttcccagtggccagcatagagctgctcaatacatcttcagagtatgtgaatctcatgccttctaagtcctccgggcagaaatgtaccagagctcacttaaaagcatagatattccttgccacacaaaccctgactatccaaatccaggagactgaaggattcttgcagatattcagattaggccctcacatgccaaattatcaggagtcaatttctgaaactcaggaaccaaatagattaggatcatatgctatcccttcctttccaaactctggttactgagactcactgcttgaccccagttactgtgttgagctcatgttttgaccccctgctcttttatgtttccatcttgagtgatgcagttgagagttccatatctttttgtatatgattttggaacaagtttctgtattgacacttgaatttgggtgtgctaggtaagtgctgaacatcctgatggcatccttccagcaagccacgccacaatgtccaaatgatatttccttatctctagtagaaccttgaaagtgggatggctgggtccaaggattagtgcatatagctgggtgtggtggctcatgcctgcaatcccagcgctttggaagtccgaggtgagaggatcacctgaggtcaggagttccagatcagcctggccaacatggtgaaaacctgtcttcactaaaaaatacaaaaaattagccaggcgtggtagcaggcatctgtaatccctgctactcaggaggctgaggcaggataattgcttgaacctaggaggcagaggttgcagtgagccaagatcgcgccactacactccagcctgggaaacatgagcaaaattctgagtcaaaaaaaaattaaataaataaaaaataagtggatgtatagtttggctagctatttccacacccttctccacaggagatggatcattttggacttctgcctgtttccccacagctttgtcaacagagtgcattgtcatctttgggaacagttttgtatactgttttgtctcttaccaccttttttcctctgcagacagagaatgtcccagttacactatcagaggagaaccgttctgaaggaaaagttggttttcaggcctataagaattacttcagagctggtgctcactggattgtcttcattttccttattctcctaaacactgcagctcaggtaaataatgacatttgttttgcgccctcaaaatgatatttacagtacctatgtttatgctattatgactgcatcttgcagttcacttggggtctgaattgaaatgtgctgtctttggggaacaaagtgagggctgcctactggtgttccatgtccgttacaaagacctgcgaaaaaagggtatctttcaatgattttaaaatggaatatgcattttcttgaacccttgatatctgggagtttgggcttggcacagacctgagctggaagaactatgcgagttctctgagccttttattctttctttctttctttctttctttttttttttttttttgagatggagttttgctctgttgcccaggttggagtgcagtggcgcgatcttggctcacttcaacctctgcctctggggtttaagcaattctcctgtctcagcctccggagtagctgggactacaggcacatgtgccaccatgcccagctaggctaatttttgtatttttagtagagatagggtttcactatgttggccaggctggtctcgaactcctggccttaagttgatccgcctgcctcagcctcccaaagtgctggggtttacaagcatgagccaccacgcccggctttgagggctttctttcggttgtccatgttagcgattgagagttttgagttggtaagtcatgcccaagtttgatttttgtctttgttgtttctcccctcctaggttgcctatgtgcttcaagattggtggctttcatactggtaagttatttctggtctgatgtatgaaatactccaaaatcagtaagaagactcgcttttccatagagttagagggaggtgtttgttgatccttctcttctaatcctcacttcgtttacccgaagaaaaattagagtgcttgctggtggagtgtaaactgcggtggtctccacccatgtctgatccgcggcatcatgttcacagacagtttcgggaactgaaagttgtgatttaaattgaatttttataaggtagatatacacaagactaagtgagctgagaatcattttccagcatgaagcgtttctcccaaattgtggttcatttttaaaaaaatgtatttatctaaatttcatatatagcttaatatttttttctccccatgttccatagggcaaacaaacaaagtatgctaaatgtcactgtaaatggaggaggaaatgtaaccgagaagctagatcttaactggtacttaggaatttattcaggtaaagtttaatcatttggtgtattgtatgagaggctgaggtgcttacaatgagcctgtgtgagtaactagggcttccaggagtcattcagtaatgtcttaacagatcaggagtctcagtcgaatttactctgtgaattaattagaataattattttaaaaatctactagaagagaggttgactgaagactcttaatttgctctgtactggattttgaaagttaaaccaggattgagcattcagaaaatcagccactggaaatatgtggctattgtctattctaataggttgctttagctaaatcttatatcattatacggatgggcagggggattagaaacggatctccaccctgtggttcggatggttccaattctgtctaaataaaccctggcttttattgaacttggatgaaatcctctggcagcaaggcccccaaaataaaagcattattccctcccaggtatgcaaagctcccttcagcactgctcatctcctgggcttcactaattacttaagagggaagctgagcagggaaaaatccagtgtctgggaattaggatgccttctatttcttaccttgagatcacaatgttatcgcgtccccaactgtgtgattaatttaacatttggcttgccagactaatattaacgccacactctgttttcacaagagtgcttagaatgtatgtagcattacatactgtttaaagaaaatcttcatctaaaattttaaatatttccacaggaaatgctcctacaagctttcctcagagatagagtgagttatctttgtaagaacctactcagtgaaatttggtgtttatttcatcgatcgcttgctaagaaatctaaatctgttaggtgtttaccttccaactgatggactatgtggaaactaaaggaagaaggaaatctattatgttctattatgttcgtgtaggatggcaggctaaggataatgcccgttgatggagttaggaatttgagctgctttcagaggttaaataacagtgacatgtcatctgaaagggaaatatttgttatagaagttacccccactgtatttagcattgtgaatgaagagatgttaggaaagctcttttaatttctatgtgaataatggatcctcattcatgtcttaataaaatgtatgatttattttattcatttaaaaatgtcttgtgtctatgtaaaacagtgggggattagttgcttatttagattaattatcttatgttaaaatataatttgtgttttcttgcaattcaattattcaagaggttttccacatgcaacttaatacggtatttttaaattctttaaagctacttgggcattttctacaaggaaaaggtaaatcatttctcctattccttgttaatatcacatgttggtatcaaaacataccaccttttttagattatgggacataatgtaagtaataagatttggaatatggagaagatcaactacacttcatgattatctatcctacttctgagtttttaatagaacttgcaattgaattagagcctagaatgaaattgtattatacacctgatttttcttttctgtgcagtttccattcagtgagagaaaaataaactattttaatccttctttgtcaatgtattttgtaaatacattatacttatgtagaatccagatgctttatggaataaattaagtaacatctttataaactacctggcttgctttagcaactattgaagaaaatgcagagatatgctgtgttctctaagtgatatttctttatttcaggtttaactgtagctaccgttctttttggcatagcaagatctctattggtattctacgtccttgttaactcttcacaaactttgcacaacaaaatgtttgagtcaattctgaaagctccggtattattctttgatagaaatccaataggtaagtctgacaccaagtttctcagtaagtatgtcttgttaacaacacatttaggatctgattacatttccatctttgaaaatggaagggatgctgggaagaaaatcactatgcatgttgattcattttccacaagaaacttcactgatatttttctcctaccagagaaaatctaaatatgcggggggaggggggggcatacaatcttttattccaatttatatgtgtgtggaaaaataaatgaatgttcactttgcagaatgctttaggaatccatttgctgtgaggcaagtgaagcatcctgcattccctgtaaacatgtttaaatgtagttgaatagttgctaaacattggctgtgtttacatagtgttaggttatgccatttttcagagggatctttgtaatcaggaatgctctgacgtgagacaggccgtgcatttctttctttcattgggaaacccgttcatttctggaaacacagggtttttgtacataccctgactgtgaggtttccctgaaagataatatgtggttaattaaaagccaagattgataaaatgtaaactccccttcaagaacagtttctaactctgtggttttgaagtagacttttggttctataatagagactttgttgaacctgccatatagatcttcagtagcttgtttcctaggtatacccaactatacccagtattttccaagtggttgatgcctctgcactatgcgcttcttatctgtcctgcttctgaggctagccttcctgacctgggttcctagggagaattagttgtgcctataagtccccaccctgctcagttgagtggacttgtggggaggcctgagtgacattgtgcaaatgataactgccctcatagaagcagggaggtggcctggagagaacacaggcacagctttggcctggccattgactagctttttgaccaaggccagagcacataggtgctattacacaggcaagtctccaagcagatgctgtagttcaaagtgtgaactcaagctaactacctgggttcaatcctggtgctggttactaattgttatagctgattatagttacattcatattcatgtcctagttacttaatttttctgtgtcacagttttcttatctgtaaaatagggatactattcatacccaccaaattgaaatcttatgagaattaagcatgttaatacattcctagcacatgaaactgggtgtagcaacatggtcagtgcctaacgaatgttagtgacaatgaagccatgtatctgtgaactgaatcaccttcactgtggggtggaaattactcctaccctctctgttttacatgatttttgtgaagattaaagaagactgttctggaaagcatcttgtgtagatttatttaacaaatacttttcagtccaagcactgtgcaacgtgcaaggatttgtaaactgcagagaccacacaaatatcggtctgatttcagctgttattagaaagtcattggaggacctctgcgctattacagctgtaacgttgcgccactttgccagttaatttgaaactacagtcataacatttggagcattaagtgggactgcctttctgttatcacaggcctcggaatgctcatgactaccattaaccagcctctccatgtttgagacctgtgggcttctcctcatgctgatttatttattattcagggatttgggacccagtctaaatcttggaggtgactaatcttacagcagcacctgagtgtttatcttgcttcctcctcctatatctattagcatgactttattccttcaacaaaatagaagcccaaataagtaccccaagagaggtctactttgtccaaaatgtttagaggtcatgaattatttactttttttagtggtagatgttgaaaaaatgtaaaaattaaaagttttttaatggtagaattaaaattttcatttagataaaatttttgcactttttacaatggtgaaggatacacaaaatctgtgaattacgcctcagaattcacattactgattgtatgcacttcaatagttatatatatatatatatatatatatatatatatatatataaaatttatttagaaataaggtctcattctgttgactagactggagtgcagtgatgtgatcacagctcactgtagccttgacctcctgggctcaagcgatcctcctgcctcagccttccaagtagttgggaccacaggcctgtgtcaccatggccagctaatttttaaaatttattttattctattttgaagagatgggatctcactatgttacccgggctggtctcgaactcctgtgctcaagggatcttcctgcctcagtctcctcaagtgctgggattacaggcatgagccactggacccagccggctttataatataaataaaaattcccctctatgatagtgaggcaggcatgctcgatttttcagtactcttaaacatacatgttaaatatgtataagtatctggcatgatgttgtgccccctgaattgcagagtgttctttgagtggggtagaaagactgggaagcatgtctgaatacttagttattaaaagcaagctcttagaagagccccgggggagtttcctatgagctcagcatcctgatattctcccaggttttagaaaacttaggaaacggggaggacctctgctggcatgtagtttccagtaagctcaccttgggatggtgactggcacagaaactccaggtgattcacaccgggggtctggctagacgtccctcatatccccatctccagtgcccttgtgctggaatattctcagtgactctggtctgcagcatagaaatgtcttctccattattttatgtccactcccaccccagtgtgccatccccctcatcatgcttctgcccagatcctcatctgtgtggttaatgaatgggcgacccttgctggtgactcagagaaccagaccttctggaagggtccccctgactgccccactgtggtcccaagttcacttatttggatttagggagaaggggaaggtaaacctggaaggtctgtgtttcttctcagcagcgaagtttctgtttcttttttttttttttttttgagacggagtcttgctctgtcacccaggctggagtgcagtggcgtgatcttggctcactgcaagctctgcctcctgggttcatgccattctcttgcctcagcctccagagtagctgggaccacaggcacccaccaccacgcccggctaattttttgtacttttttagtagagacgggtttcaccgtgttggccaggatggtctcgatctcctgacctcgtgatctgcccgcttccacctcccaaagtggtggggattacaggcgtgagccaccgcgcccggcctgaagtttctgtttctaggaaggccacgcttctccaacatgccagatattaagttcctctccatttcgaacccacctatggttgcatgaaattcatctttgtttatataatacaatacctttttatctactggcctttcgttaacctgataaatcttaagctagcaggataaaatgtgagccaaaccagtgtgctgccttagaatgacaagagccagttctctctctctttctcttttctttcttttcttccttcctttcttttctccttccttccttccttccttcctctttcttcctttcttcctgctctgttgcccagtcgagtgcagtggcatgatctcagctcactgcaaatgtccacctcttgggttcaagcaattctcatgtgtctatctcctgagtagttggtattacaggtgtctgccaccacatccggctaattttttttttttttgtatttttagtagagacagggttttacctcctattggtactgagatagcagttttcccaagaagccaagtactgacgagcaatgtggagctgggtctgaggggcaaccatgctctgtctgctgttgggagcgggctgggcccccagcaagaatggacacacattcatccaaggtgaccaccagtggacaaatggtgactgtttgtgtgtgtgtgtgtgtgtgtgtgtgtgtgtgtgtgtgtgtggtagagtctcactctgtcgcccaggctggagtgcagtggcgtgatctcagctcacagcaacctccggctcccaggttcaagtgattctcctgcctcagcctcccgagtagctgggattacagtgtccaccatcacacctggctaatttttgtatttttagtagagatggggtttcatgatgttggtcaagctgatctcgaactcttgacctcaggtgatccacccatcttggcctcctaaagtgctgggattacaggcgtgagctaccgcgccctgccaagagccggttttcctttctcgtctttttatcctcctctcacccattgctagtttttattctttcctcttttgatgtaggttggtgatgggatcacgtgtgtctgttaagaagccttacattttcagctgccctcggacacctccttcatattttgattatgacctgagttgaatagggcatttgcagatattttctggtactgttcgctgcatctacctcttcctagtcagtttttgtgtgtgtcttagccctgtttccgttctgttccaatcataataaatgggtaacacaaatcctaggtcaagagtaagtcttcagaaattaagagatgatttttattttaaatgtaaatcctgttttcctggcatgggcagaattaattttgcttttgatatccagcacaagagggcagcatgatctgcagtatttcagtgatataatgtaagagcacctcattgcaaaacctggtttttaatttaaagctttcttggaaattctatttttatagcttgggtctttgtatcttgatatgtgttaatatgaaatttaaaaagtaatattgtggcgtattatgtttgaaacatgaaagtctttgtggaagatatttttctgatgttgtcctggaatacctagcatttcaaacagggtttttttggatttcctaattacaccttcttgactagtaactggaataggcagacgctgacatcttgagtggttggatgcattttaattcctgaagcatacattatgatttgcttgtatgatgtttctgttttctttgtaagcatgagtttgcagagaaagatagttacacagttagtttctttagttttcttccacgccaacagagttagcagagacattttattcttatcaggtctctacaatttcactctttgttttggagaaaagatgagcggtttgttgtcctgttttctcatgcctaattatggtgacataacatttagctaagtacactgactctaatgggtgccagataaatgtttacttgctttcaatttgttaatttggctttaagaacccaagagctggtgttggtagaagtgtttgtttactctctcagggaagtaaaagttaatattgggttacagccagtgtgttttacacaactggtttttctccagtgtgtgcgtggggagtatgtgtgtgtatgtatatttatgttcatcgatgccttcaacagtgtaacaaaaaaaccagattcatatcattcttttttctttatagattaaggtaaatgagagctaaaacactagataaaagaaaaaagaaacatattgacttcttcccatgtttcttttttttaatccagtggaagatgcttgtggtcactgaggtatggaatgcgaatgctagtactagattttaagatagacatattctcctatgttccctaatcaaaaatcgagggttgccccagtgattaagattctcagcttttagccaggcgtggttgtagtcccagcagctcgggaggctgagtcaggaggattacttgagtctgggaggtcaagactgcagtgagctgtgattgcatcactgcactccaacctgtctccaaaaaaaaaaaaagaatgattccttcccagcttgactgaatgggaagttaggatgtgcatcctacaggaattgaggggaggagggtggtagtggtttgaactattgttctgtttctgaaacctggaaagggactctggaatccactacaagttgctaaataatttgtggagaactgaaagcaacctccatgatgagctttttatatgatcagaaagactgtcttgcgatactctataaaatctgatgtccatatcccacttccttgccagaaaaaaagagtcatcaataaagaagaaacataattgtagggatacctatttatctgtttattcagttcaaatgaccactggagttggtgctaaatgtgcatttttaacaagtataatatttcagcactgtcaaaattacctctacaataataggcttgttaaattatagctctataagctagggggtaagatggctctgcccagcacacattaatctatgcctgttcacacaagtgattctgctgagcaggtagcatgtttaaacaagaaatactggtcctaaaacctctgatttatggtaggtgttgttttgacacagcaccattcagacaatttacaaggcaaagcttcgtgctaaaatatttcctcagtgtcatcattcgtcaccagtataaatattcagtagtgatgctggaaaattggtaatatgcccattgatgccaaatcactcgctatgtttcctttcaagtgagatctgttgtggatatggttaaaagaaactatgatttttcttccttgagagcagatgagctgtaagaaattgagaataacaaccgtcctgacagctttcatgtactcaatcttgcctatattgcttttaattctggcttaagtcctgcgggctttccctcccacccccttgcctgatgcgtattgtaaagaacacatttatatgtacattagttagtttaagaggctttttgtgttcaaaggaagaagttagtcatcaccagaaaagctttgttgcaaaacaaaaacacacatttcccctttcattttttcttgttaataataacaaatgcaagtgactataaagggaataacacaaaagattgcatcaatcataatgattctcaatagccacataaatattgttttttcagctttgaatgaaacagctaagagtttgaagtaggtgtggtaattaaatcctgtcgggttatcacaaattaaaaataatgtttttttcacataacaatggttatatgtacttaaactcttatcaggggtgatacgaagtcatattttatgggagttgctcctttactgctaatagtatcataaaagcctttgttaggagtttaaatagttacgtagttacatatatttgattgctattgttattttgtcagtaatctgtatgtaagcgattactgtagcacttgtctacagctggtaaatattgcatcattttggcataatttttaatctactagaatgttctgattcatggtttttctccataataaatcatacatggagatactgacaacttagtaacagagaaagcactgtgtttgtccaataaaatgttaaaaagataaaaaactagggaagaatgtgctttgttcaaagtgataatcatgtaatatttcaggaaattataagatgacattttacttaactgtgttaaattgttttcctatagtgtatataatgtgatacctgcatgtatttgtatatgcctgtatctctctctctctgtctctctcgatatatgtaagttctccacttcagtctaatgtccgtggctatggttttaacgcccccccattaactgatttgatatgtgttgtctttatctttatcttcggctaacttggaactagctaacttggaactcagggctttgtagcatatcccaatatctgctgttaatgtgtgcttagtaatttggcattagcctatgggatgtgtgactgataatagtaattcaagtattgtcatttaaaactgtcccccactgttagatcaacattatagttctctgtgaccttattgtcagaaaagaatcaaagtatcttcatgacttagttcttagctgttggataaccatttcaagggaaaatagaacactgtttctggaataacctaatgatattccattagccacttgcagtggccgatttcaacatgaataaatattgataagtatattactgagagcctaatatgtataaagcatagtttttggacactaagtggaagttgttgggatttgctagcttgaaacgctgttctgttttactgtaaggccaactgcttcccctcaaagatttgactttgaagttctcatatgagaactctggttttcatttataattggagttttaatttgagagttttccatttataactggagtttaatttgagttttatatgagaactgattttcacttataattggagttttcttattccattattttattccttccccctttattataaacatgattatttatattgccatgaagacagtggaaaaaaaatcagaatatttacaacgctgaggttgtgacattttgttttccatgaagtttaaaacatttttgcttttatcaagtttttgatagtgtttatgaaaatgatagttacattctaatttaggtaattacgtatttaccacccttgtcttatgttagccttgtttcccccttgtcttccttgccttgttttccccttgtcttcttggagcttatctgttgtttccttgctaaatcccctgagcccaggattggatacactgtatctgattagtaaatatttgttggctggacagaacaagaaatagttccaagagtgcatttgcatctctttaagcaacacccataaagaacaatgggactttacagtgttgaaataaaattagagtgttttttgtcttacagctggtacttatattaaatttaactcttgcttccaattttctttttcaaaagtacagtttgtaatagattactttggtggactttgtttctgatacgtgatggcctgaagagaaaaaccgtacattggttctttggaagctgtgattcatggaactagaccaagttctcctgttgtttaccagtcaaagaaatgaaactgtcaaacacctaataacttttttgggggtttagttgtgtgttgaaggtgacttttaacactctgtgggttaagcgtctggtactgtatagttttgtttcataaacttcatgcccttaagaagtaaagagaggaattaatccatttaaaatcatcagtagacattgaaaatctgttcttgcacagggagttgaggtgttgagatgccccaattctgctaggatcatagtttgtggtaactaagtcggtcacattacttctcttagcctcagggttctaacaggtaaaaagtggctttttcattcatcaagcatttcttggtcttctactcatcgtcagttgtggtcccaaacattgaaacaaaagtacctgttttcaagggacttgcaaacttaaatagttgccgacagtggatgatgatgatgatgatttcttctccttcttctccttctcctccttcttctccttcttctccttctccttctcctcctccttcttctccttctcctcctccttcttctccttctcctcctcctcctccttccttcttcattcttcttccttcttccttctttcctctttgttcttcttcttctttttttttttttttcttgagacagagtcttggtctgttgcctaggctggagtgcagtggtgtgatctcagctcattgcaacctccgccctctgggctcaagcaattctcttgcctcagcctaccgagtagctgggactacaggcatatgccaccacacttggctgattttgtatttttagtagagacagagtttcaccatgttggccagactggtattgaactcctgacctcaagtgatctgccttcagcctcccaaagtgctgggacaggtgtgagccaccacactagaccaacaatggattacttctaaaaaccatcctgtgtcagaatctatgatctcatatcaaaaagatgcatattaaaattaatgcagctgccaaatggaagtctagatacttttctagatacaacacacatgagcatagctccatcagatatgtcttcttcataattcattggccttgattttataaaatttccaaaaatggttcttttggcacttcaaaaccaattgtgttcaaaagaaatcataccagtgggagtagcagaggtgttcaggaaacaaaataaatgattctttatttcagatcataatctctaagcttcaagtggactcacaacaatttctagctagactcttgactgggcctagatgcttttctgagccactgggggaggtctaagtgctacagctcagcttaggaaagtgtgttggagaaaggggagggacttccagtgttgccctttacaagtacctgtacacgctttgggcttttagaagtattgataggagaaagaacataagtaatgatattttccctgtaagtaatgttatcatgaaattcaactatgattcactgagtgttctcattcttggtcaccaggattaatgtttgagaaatttcttcctcgtttaaatagaagctctttcatatctcaaataaagactcgacaagcttcaaagtacattttgaggccctggcagtggggaagggggagggagggggaggaaaaaaacaggacatttttgagaggaagtttattaaaaacaagttctctgttctggaaacattttcctttcatgtcttgtttgcatttgcattttaatagattatatcacataggcaaatgttccagcacctcttgaacacctggaaagcctgtcttagacttgttctggtgtttagaaatctttaggcagacagtgttccaaatacagtcatgctcgccaggcatggtggctcatgtcatataatcccagctacttgggaggctcaggcaggaggatcgcttgaggccaggagtttgaaagcagctcggacaatagcaagaccccatctctaaaaaaaattagctgtgcacagtggtgtgtgcctatagtaccggctcctcgtgagactgaggtgggaggattgcttgagcccaaatgttagaagctgcagtgagctatgattactgtattgcccccccaagcctaggaatcagaatgagaccctgtctctaaaactgtgcagcaacatctgagaaaacagtatatctcccctggttgatcttcagcctgatagtagctaatcagacttctctctgaacttcaggtggaagtttatagaaatgttcttttgcttcagtgactggtctcattcctcactctgattgaagcacataatagaagagttcagagattttgggagttggaggaaaaaatagcatacccagttctttctgtgttccgcacaatgatattggaacagggaatatagttgaagcagatttacccttaaatatattttctccacatacaattccacacgccttgatcagcagcagtgctttgaggcatagttacaatcatggattattttttttcattacctttacatatttaaaagtagagaaggaaggaaatggttgcttttttaaaagtagtcattatttttaatttttttttcctcctgttggtgtcagaatggcctgggcgcataaaatttatttcctttgggggaactataaatgtattcttcttctctttttggagaataaaatggtagtgacatcttacaattatcccatgcgaatataaatcttctctatatactccctattacttagcatgaaaatgaaaagggagtcaagtatagtttaataagttctaccaatgaactgtattgtagacagaagtatttcttattggtgccaagttggaaaagttagtcttgacgtggtcctgtaaatgaaaggaaaatcaacacatacatttcaggatcatgagtgatcagtgtcactagaaaagtgttcttctttcactttaagattaaataaatagttgttgacataaatagccggggtaataaaagggaacacctgtgtaatccagccatcagcagttttatcgtacaatcagataagctgctgtttgttaaggaattgtcaagtctttagaccagatgaatagatttagctcatacgttagagaattttaaaaactgaacagaagaagctttaatttcccttgatgccaaatgttctaaccactctcatctcctttcacacacgagaagctgtaggagtttaaagctcaattgacctagccttcaggtatgtcttcttccattagttattgctgtaccaaagtagctaaatgttctagatgagattagggtttgaaattttatatggcaaaataagtacctcatcatttttggataaacatggggtattttttttctaatacagctcatcttttctctccctttaattctcatgtccactttcatttgatgtcaaatgagagagaactttggttgtcatttaagagcctcttgatcaaaacagttatcttaagaagcattgattgtgtgtgtgtgtgtgtgtgtgtgtgtgtgtgtgtgtgtgtgtgtgttgtgatgggtaggggagagggagagagagactttttagttagcttgtcccaccacaataagaattatatttttggattctcttaataatatgtgaaatttaaaatttgaaaattaatcagcaaataagatgtcctttgacttcacccaccagcaaatggaaggatttttctttattttctaataggggatttaaatcactatatgatttgggatccatggtacccttttggtaaaaagcatgactttagaatcagcctgcccaaatgtgaatctcagctcttccttgctgaattacttaaactctttctgcttcaacttatttgtagtatggcgatgatattaacagtacaatcctttttttgtgtgagtgacaattaagagaatcaatatatgaaaagcatttgatatggtacctaacagctaaaaattgatttttttgactaattgagatgatgaaattttagtagtcttaaaaaatgtacaaattccaaatttgctagttttgatgaaacaataggagtctgggaagggtgtctgtgttttcctggatgcaaagaaaaatagataaatgaccaagactaacaagccacaaaagaaaatcaatagagtattttttttgtttgtttgcatgttttctttttggttgtgttttcaatggggcttagcttcattccagagttaattttaaatttaatttggttttacaatgagagctcaattttgcatgtaagtaccaaacatctggtttactttttgtttgaaaacgatacagctgaagttgagtacagaagtctattgtgtaattaaggaaagagagtttgaaattttgtaaaataagttctatttaaatggaatattggaattattccagagaagtggatatacttcttaggagtaggagaaacttacattatttttaaaaaatgctataactagtccaaatgtataaattctatgtattcacctttttcaaaaagcatgaaaaatgacaaatttcacaagtgaaagttaaagttgacctaaggcagttttagattgttgagccttcaaattttattcatgggatgtttttagagacagtctgtggtttgatcactccagttaattctgggcaatctttctacatttctatcagatggacattctgatattttaaaacttcctcttgcgcaaaatatgtttaaagcaacctgggaagaaaatgagatttctggttagttcttgtaaactataaattatgtttttaagacatttaaaggaattataagccaaacatagataactcctgttactgcactattaccattaataaactaacaattaaaatgccgtaaagtactgactggatataatactagcattgtgatatataaaaaatagaatttggggtggagagacctaaatgaagataggacacctactaattttccacctgcttgccagatagttgtgtcttcaggcagagacacccaactagtccagagtcttaggattcaacctcagtaatgtcagaaaggccctcagctctgaactgcgatgattctctcattctgtgcaactcttttagaaataatttgataagagcttaagaaagtcaaaaataggttgtttgtaagacatcagaggatttttataatagttttgccccacccttgaatgttttagaggtctgttgtaggacagaggttttggtttctggcagttgcattctagttctctaccaaattgaggatcagccagaggtacaatacatttggaatcttgccctgtgtcttataattttatagcaacattataaatttatttgacaacttaagcttataaaacttctgtcacttccgttgtcttgtttcatctgcagtagcaacaaagcaacaagaaatctgttgcagtctctctgcctctgagcatccacacagtagatccaccctcttctttgccttcttgcccaatactcttgttattgtccctatcggtttttatgtggcaaccgcagggatgtgatgcctgtaattgaaaattaaatgattgccataaatcattaatcagactgcagattataacagcatttattaagcatcttggtaggccaggagtgtgctgggaattttgcataaggtaaccggttactgtcttgtgaattctgtctgggtattttcctgtgtttgtttcttccaacttttatttttggttcagacggtacatatgcaggtttgttacatgagtagattacatgtggtggagggtttggtatacagattattttgtcacccaggtaatgagcaaagtacctgataggtaattttttgatccttgccctcctcctaccataaagtaggtcccagaatctgttgttgttcccttctttttttttttttttttgagagagtcttgctctgtcactcaggctggagtgcagtggcgcaatcttggctcactgcaacttccgcctctggggtgtaagcaattatcctgcctcagtctcctgagtagttggaattacaagcgcatatcaccatgcccagctggttttgtatttttagtagatgtggggtttcaccatattggctaagctggtcttgaactcctgacctcaggtgatcctcctgccttggcctcccaaagtgctgggattacagccgtgagccactgtgcccggcctgttgtttccttctcagagtccacatgtactaaatgtttagctcctgtttgtaagtgaaaacatgtgatatttggttttctgtttcttgttaatttgcttgggataatggcttccagctccatccatgttgctgcaaagggcataagtttgttcttttctatggctgcgtagtattccatggtgtatatgtaccacattttctttatccaggccaccattgatgggcacctaagttgactccttgtgtttgctattgtgaatagtgctatgataaacatacaagtgcatgtgtctctttttttttttttttttggagatggggtctcctctgttgtccagtgcagtggcaagatctcagctcactgtaacctccacctcccggagtcaagtgattctcccattttagctttccaagtatctgggactacaggcatgtggtacctaatttttttttcttttttttttttttaggtagagatggggttttaccatgttacccagacaggctggttttgaactcctgggctcaagtgatctgcctgcctcagcctcccaaagtgttgtgattacaggcataagtcaccgtgtccagccatgtgtgtctttgtggtagaatgatttattttcctttgggtctatacccagtagtggattgctaggttggatggtagttttcttttaagttctttgagaagtctccagactgcttcccacaatggctgaatttccatttcctccaacagtatatatgtgttccttttctctgcaacctcaccagcatctgttattttttgactttttaataatagctcttctgactggtgtgagatgatatctcattgtggttttgatttgcatttctctgatgtttagtgatgttgagctttttttcatatgcttggtgactgtttttgtcctttgcccattttttttactggagttgtttgttttttgcttgtaaacttaagttccttatagattctgttctttttgcttaggattgctttggctctttggacgctattttttgattccatatgaatttcagtatagtttttctagttctgtgaaaaatggctttggtaggttgataggaagagcattgaatctgtaaattgctctgggcagtatggccattttgacaatattcctatccatgagcatggaatatatttccatttgtttgtgtagtctctgattttttttcagccatgttttctaattcttgatgtagagatcttttacgtctttggttacctgtgttcctaaatattttatgtttttgtggccgtggtattcttgatttggctctcagcttggatgttagtggtgtatagaaatgctactgattttatgcattgatttttgtatcccgtaactttgctgaagttgtttatcagatctgggagctgttgggcagagaatatggggttttccaggtatagaatcatgtcgtctacgaagagaggtagtttgacttgctttttcctatttggttgccttttctttctttttcttgcttgattgttctggctaggacttccagtattgaataggtgtagtgagagtaggcctccttgtcttactggttatcaaggagaatgcttccagcctttgtccctgggcattttctaaagttatgtcgcccattcctatatagtataatattttatgttatcatcatgcttcaccccctcagataagggttaagttacgtttaatatagtacttcctttccaatgaatgtggatatcttattaatcatatgtttaaaaatttgacaaatttgtgtgacctggaaaaatccatcacaaataacaggtgtcacagtgtgtatctaatggatgcgtttatctgtctgaatgtgtatgtgtgtgtgtaatgttgatataagaattccaatttgagttacatgtgtgaaactaagaaatattttaacctctgtcttcttcaccttctgaaatgtttactcagctgttacataaacttgcttttatcaattttcagaaggatttagcatttgaaaatgagttagtcccacaatgggagaaaaaagtttttactatgtagtaaatgttactgcttctgcaaactagatgatcacttttgcctgttatcatgggcatacgttttctagacttctagcagtacattggcatgactttctaaatcaagtttttataattttttaaccggtcatatgttaggagagtgctagctctgaaatttgtagtgtttggtgtcataggagatactgtggaatggtgctaccatagctattccttggcatttgtgtcctactgggagtggaaataattctgtctttggtatgaacattttttccttttttagctctccaaagtgataatggagaactttttatttatattttaataaaaaggagagaaagagggaaaggagacagagaataaactctcaaatccttccaaattagaagtcctgttaactatttcaagatgtctttggtcattctcataaattttagatttaattataaatgtatctagaacatttcatgtaggctattttggaaatgcagttgaacttttaataggactcatcattgttagactttgaatgacagaataacatggtcagaaggggcatctcaggaggttcctgttagaagaaccacagccaagtgcctttcaagcttgtggaaatcccatccagctgttctctaggcctgaaaaaatgtgggaaatcgaaagattggtgaattctcttggtggtctactcagaagaaaccatattagtaatgttgatggttcagtatcaaacctggcttgggctcagagcttgtgagcctagagtcacacatgtaccaatccaggtgagaccccagctgaaaaatttctttgccttgttttatttatatagctaggctttttagtacatggcccactttttagctacttgccctcctccacccataaatcatggtgatgagaaagacagagattcttctatcatccattttattccttgtttcttcttcttattattatatttttttggcagtaatttaagagatttgctttctttcttgtttgctgtagaagtcaaacagtatttggaaatttgcggaaaatagcgtttcataaatcttctaatttagtcttcacaaggcttgatattttatagtgagacactgatttttactcatacccttttcacaagtagtatgatgataagatctaatcctaattctagccatctatttgttctttgttctaaaacttaagtgtgtaccttagatatcactatttcttttttttctggtttactcatgatcttttgttaaatttaaaaatttttttttttatttccataggctattggggagcaggtggtatttggttacatgagtaagttctttagtggtgatttgtgagattttggtgcacccttcacccaagcaggatacactgcaccatatttgtagtcttttatccttcaccccctttccaacctttcccctcaagtccttaaagtccattgtgtcattcttatgcctttgcatccccatagcttagctcctacttatgagttgagaacatacgatgtttggttttccattcttgagttacttcacttataataatagtctccagtctcatccaggtcactgcaaatgccattaattcattcttttttatggctgagtagtattctgtcgtatctatattccacggtttctttatccacttgttgatgggcatttgggttggttccacatttttgcaattgcaaattgtgctgctataaacaggcacatgcaagtatctttttcgcgtaatgacttcctctgagtagatacccagtagtgggattgctggatcaaatggtagttctacttttagttatgtaaggaatctccacactgtcttccttagtggttgtactagtttacattcccaccagcagagatatcactatttctgttgcttcagggaaaaccagtttccagtttcctttatgtattgatggtcctctgaaaaagatagagctggacactgtggtgcacacctgtagtcccagccactcaggagactggttcaggatgatcccttgagcccaggagtttgaggccagcctggtcagcatcgtaagaccccgtctcttacgaaagagtcaatacacacaaataggtttactgaataacacagccattttctgttgagggagcaactggctccttggatgattggattagcttctctttttttggcccaaagtagaataactatggtatttttaccatttcccctcagtctcacttctaaggttcttttcaaaaatgggctaagatatgttaaggtttattaaaaacttcattgataccccccaccccccaccttgtgtaagctgcaacttagtcagagagattacatgtggagctttatatttatggtacattctttgttctctgcttttatactgcacctcagaggattcttaaattctttgacttttgaagcttttcgttttctttgctgagtttgaggacaaattttgggcaaaaacacccggatgataaataatgcatctagacaaaaagagaaacaaagtgaaactcagtgaaaagtaaatcgacctaaacagtctaagaacatttaacgttttgattacatctcatgacatttgatatcttgaccccttcagcctgtgctggctgttgcctttgcctccgacttgtaatgtcagaggattaaagctcttttactcctttctggtgaaaatatttgcaatttcagatttgtaactagtagatctgttcagctgtaaggaaacctttcagtgatgagcaacacgacttttcatctgagggatgcagagtctatgactgcccgagagattgggatcctgtagtggttttatttcattatgagcctccaccagtattatttaatgcaaccaggttttgaatgctggtgagaacacagttaaggtcatggtctgcaaggactttgatgtcgtgcagaagcctgattttcccataataggcatgaaaagcttgtgcaatatagctcttaggagatgaatatttgttcctgtaggttacaatagcagacataacctgtgagtgatggaaaatgtcgggcagaatatggatttggaggaaaaaggggaagaactagtatgaaaaaattagccatagaaatcgatagatactaggccaagaatataactgcaaacgtgtcagctgggttttcccaagaatgattgacagacactattgcagatcctgcaagtaaagaatttctgatgttttctttttttttcctttaaagttcaactaaatgatttccttatagatttgaaactcttttctccttatacagaaatttctcctctcttcttagttcccagatttttgtgctaagagaatgcataaaaggcaattattctgttgatatctttttaactatctgtaaagatatccatattgattcttagggccactaccctggtacagtttttggtggcttgaattaataggatggtttgctgtccattttatttgtgtctggagaaaactttaggttttaatgcacttgcaaattccttgggcaatctgtagcctgtttggctgtctttgttgcctttcctttagatgctatgccgagtccatgaagtgctcttctctctaaggaatacagagactggggatagtccccagagttgaggaaacgtagagccccgtaggtgtaccagttatggtgggtggtgggagtgccctgggctagcgctgaaacttcaggttttcagtggttgacatcatgagtgaggagacttttggaagaagcagaactgaaggtaagactgagtaagtggatctgtccaagagtaaggagagatgaggcctggagatggtcaaggcaacacacagaatctgactttggcagtggatcctagaccagatcagaaccagaactagagatcaggaggtcagcatggaatcagtgggaagccttccatctgcatggttgccagcttcgtgccaagggatgttctggcaattatggaagcacatattggtacaggtttgactaaccacccagacttttagcactggagtttgttgttgcttttttaaattttttcccccaggacagctgtcaatttggggagatatacaggtatgaattgcatgggaaagaaccattgaatatgactctgggatggttaaatatcttgaagctgcaaagaaggaacatagaacaaagaacaagatgaattctcatcttatgatttaaactgcatttaaacaatgtccgtagatcctgccttcctggaggtagaggccaagtagcaccatatacatatgcgtgctatttctgagcactcacggccccattgggcatgggctgtgtaggtgccaaggctggaggggctcctggggctgtgggtgttttgctcaccccctacacagcttgccctcatgcttctctgtaacagggtcaagtttctgggttacagctgccacaggaacaagctggcacattcttcttgttttgaatttgaccactgggtatttatttattttcccacctttgattgacatcaacgtttggtgacctccttcatccctcctttgggcggccaatcctgcccagccacaacactggtctcagttctcataatgatgttcccatcatgtctcttttgtaaacagagcaaatacagaaaatgccagtttctaaactttcacttaatttctacccatccactcagaaatacccactgagtcttatcttgagttaggcactgtgtttggagctaggccaagaggtcgtcaaaattgtggggaagatggatgcgcagtaagcagcagagggctgggcttgggattggctccgtggaaggagaggcccaggggccacgggagtacaggagacaagccaaccagatttgaggtggggcgagccttgaaggatctctcacggacctgtcatggggatgggtggttggggttacagcagccctggaggtaagggaaaggagctgcccagctggcgtggagtgattgcaggccaggtggtgtgagggcctgcccaggccaggttgggccatgcagggcagataaaggattttaaactttatccctagagcaggaaggctttgtcttcagtaaaatggatgcctgataacgtcacctttcggtgcttgccggagctccatttcatcagggaacctattaagagtaaaaatagggactcatttggatttttaaacttttttttttagaatcaggatctcacgatttttcccaggctggtcttgaactcctggcctcaggtgatcctactgcctgggcctcataaagtgctgagattccaggcatgagccatcgtgcctggcctgtttgtttgttttaaacatgaacttattttaatgtgtcacaaattttgtaactatctgacacttagttcacatttcaccatattgtttgtggccattttgattctttgattttcatttaattgcattgagtataatagcagcaaagtctatcttcttactgtttgttcctgttccaagcacctcccaaagaggagtaaaccaacatattttattatctctgtaatccagaaaattattgcataaggacatgtacacatttagtttggaactccagggcaaattagtatatttcctgggtttattttcttataaataatgaccaatatttcataaatattcatttaccactggtcatttaaaaagtggaattgcagtaaagttttaattggtaaagtgtaacgtgcttgtgtgtggaaaggcagcaacagacttggagacttgagcttctaaaagtttcattagtactctaagggctttatcttagggaaagaattggtcctttttctgtaaaaataaaaatgctgttcagtattggttccccccgccccaccgcccactttccccaaagaaaataaaactttgctgcttaatcagggttccagatgtctgtatgtatttatttattcagatatttatagtgttctctgtcaaacagtttgcctccctgggtgcattccagcaatgttaaaaacatacatggcaaagccacagagatcaaagacctgtgtcttgtgaaccctttgcaacatttgggccagtctctaaaatgatttatattaaaacaaccaaataagcactcttcctgtccacatcgtgctttaaggagtgttctggatggggcctgaagaacccgtgcaaattggagttcccccccatctttcgaatgagggacaccaccaggaaagcttcctgtggggctgcatttgacccgcaggtgcctctcccatttcctgtatttccacattttatttttgttttcattatttcttcctttaaaatatgggagttaacgattttacccccccttaaatattctaccatgtagaattttagactgtccattaaaaatatgggtttcattttctatattattttcaaaatatgcagtatctaccatctaaatgggaaacagcaagacttttttgtagtgacaaattaatgccactgtgactaatatctctgaaagggaagtgcctgtagcagctgaggcctgtgagctggagcaggacaaagcatagatgttgtgctctgagtaagaaagtctcaatacacgtggccttcctggtgagagctcttacttgagtgttttaaagaccagtgatctggcttagtccatcattggaaagtgttatgaaagcggccaatagacattttcctacttccactgcttgttgcagatcttctcttctggctgggagctggggtggatccggtaggggacagagcagataggtgtgtgaagtgacaaccttgaaaagaacctggccctatctacctttatgcctaccatctgtgatttgccagagttctctgcagagcaaaccatgtaaagtaaaatgttgcataaacctgctactctatccctggcccaactctgggtgtcaagaagtatgctgtgctttctgcacgaatgtgatgaatgtgggaacctttttgagatagcagcacatgctggcagtggcgagccgtgtgcgcctgggcaggctgggcgttcggcaggcatgttcccaggcacttcctagggacttgttgcatcatcaggtgtttgattctccaccccgtccttccccagcgtgtccaccacccttaggtgagagagtagaaaggagttccactcaaactaggagaattgatgtgtggctgtggaatttcctgtctttccgagttagcatgctatttgtagaggaaccttttggcttccatttgagactggatctcctttgtggaattcatccgtaactttaagagtataacttaggctcctgtcactactagttcatgctgggaataccctcagaaaggctactgtcagtccaaaccaaagttacccagatgcttctctttcttttttcaaagttgagatctggccgggtacggtggctcacgcctgtaatcttagcactttgggaggccaaggtgggtggatcacttgaggtcaggagtttgagaccagcctgggtaacatagtgagacactgtctcttcaaaaagtacaaaaattacccaggcgtggtggtgcatgcctgtagtcccagctacttgggaggctaagcccagaagacggaggttgcagtgagccgagattgcaccactatactcactttttgagacgggagtgaaaacccccgtctcaaaacactaaataaataaaataaaaataaatttgagatctttccccacaatgaaagccttgctgtcccttaaatattaataacattaattactgttctacttaattttatattaaattatatccaaaaaatcatgatttgctaacatttttaaaaactgtgttttaattttgctagatgtagtttaaaacctagattgaaatttaactagagattgaaactggaattctttcagtcctaatgactagctgtggtgtatttttaaaataatatttctatagtttatgagataagtaatagtttcatgttgctatttacaaacatatctcctacaattacatacagtaggtagtttttatgcctaatgatttaaattacataagtgaaaagtcaaactgagaatatttgtcaaaatattttctcttattaatatgggtgtttagaatgtgagcaacatctttaatataggaattatgggccaggtgcagtggcttatgcctataatcccagcacttctggaggcagagacaggtggatcgcttgagctcaggaattcaagaccagcttggtcaacatggcaagaccctgtctctacaaaaaaatacaaaaattagctgggcatgatggtatgtgcttgtagtcccagctacttgggaggctgaggtgggaggatcacttgagcccgagaggtcaaggctacagtgagctgtgattgcacagctatactccagcctggccaacagagcaagaccctctcaaaaaaaaaaaaaaaagaattatggacattattatattttacctgatcgtgaaatgtagagtgttcactgaaaactttagtttcacggaaaactttagttgagtttgcaaaattacaatttttatgcctctgtaactttttctgattttgatatcattattcacttttacgagtctaaattaaatatgagcaaaactagaaaccatttaaaatggtgggattctcaagctcgtgctggtgtctcttgcagatagctaaatggtagatgaaatagtgaatgaattgtgagtctctgatttggtctctcctacccaccatcaaggcttatccagagattttcaaatagcttttgcgtaagggagacaataattaagctaattattttccttactgccttatgaaaatataaattaaaacagatgtcacttgctgtcttccatggcatgaacctctgtggacaggagactctacactagactagtaatttagggtctgtttttccccccaagttcagacttaatcagatcagttgcagataccctgaaagtgaggccccaagctcctgggtgtcatcgctgcttggtgatcctctgggcatttggtactgccctcttgcactcctcttcccacctcccaggacccccacttcccctgagcatcatttccttctctatggctcttgtccttatttatttatttatttaaatttttttgagacagagtcttgctctgtcacccaggctggagtgcagtggtgtgatcttggctcactgcaacctccgcctcttgggttcaagtgattctcctgcctcagcctcccaagtagctgggattacaggtgtgtgccacctcctccggctagcttttgtatttttgtagagatagagttttgccctgttgtccaggctgatctcgaactcctgagctcaactgatctgcctacctcggcctctcttgttttcatttaaatggctcctgggatcacatttccttcactacatattcttagaacacttttctagaatagtctgcagcattttccttctttaaactcaagactcgcccttctccacttcccttgatcccgttatgtatttatctttacttttcattgctagaaacacatcccctggaagtatagagaatgtttgtacgtcactgtcttcttccatttagatcctctatcctctctttttaaaaaataacatatatattttttggcatttccccctcctccttttggccttcggttctcagtgtatacaagctcacagagggctaggatggttactgcctctgaatgaccattattcatgcatctgagcattggtaactgacctaggaacaatcagcttctgatgggctcctcttgaaattgtagcgcatggaaggctttagtgaatatcattgtgttgacttagccatgtcacccagtggggtggcatttcattcatattcatcatttacatcttaacctgaacgtgtttggcttgggcaggaaagtggggatcaagaatattgattgtgtaaaatatttttcagaaaggtcaattgctatggcgttttctaagggtcacccaatgctttgcagagtaaaatgcttacccacatcctcttcattctccttttcttctctgcataaggtggctcttgtgtcccttcagcacccttctctgccaccacaggcaggctcttcctttgccattcctcccctcagatgtcgctgttgttgttcttcgctttgctctccttatcctacaaggagagttctcctttgttggaggtgggaggggactctggtctccagaagtgctgttactgtctcatctctctcaccagttggtgacagaggggctaccacagcaggtacctcctctgtgacccaggcaaattgggtgctgagtgtccacgtcgagctgaatgctctgatggtgtctccaggaatggatgcatgtgatggatagactggatgctgagagaaggatggctggaaagtttttttaaaaaaatgtttttagggactgggtgtggtggctcatacctgtaatcccacctttttgggaggtcagggcaggcagatcaattgaggccaggagtttgagaccagcctggccaacatggtgaaaccccatctatactgaaaatacaaaaattagccaggtgtggtggtgcacgcctgtaatcccagctactcgggaggccgaggtgggagaattgcttgaacccaggaggcggaggttgcagtgagccgagactgtgcccctgcactccagcctgggtgacagagcaagattctgtctccaaaaaaaaaaaaaaaaaaaaaagttttaaaatcatagtaaaatgcacctaacgtaagatttgccatgttaatcattttaagtactctatatagtttggtgacgttaagtacatttgcattattgtgcagctgtcaccatcctccatctcctgaacttatccatcttcccaaactgaaacccaggacccattaaacactaactccccaccaccccttctctccaccccctggcattcacccttctactttctgtctctgagtttgactgttctacatgctggacataactggaatcaaacagtctttttccttttctgagaggcttattttatttcgtgtaatgtccttatggttcatctatgttgtagaatggcccagaatctccttccatcttaaagctgaataatattgcatggtgtgtatatacagtcagccagcctctgtatctgtgggtgctcagattcaaccaactgagaatggaaaatatttggaaaaacaatccaataaaaaattataataccacaacaaaaaaataatgtattacaaatacatagcacttacattgtatttaggcattataagtaatctagggatgatttaaaattaaatgggagggccaggcgcggtggcttacacttgtaatcccagcatttcgggaggctgaggtgggtggatcaacttgaggccaggagttcgagaccagcctgaccaacatggtgaaaccctgtctctactaaaaatacaaaaattagccgggcttggcagtgcatgcctataattccagctactcgagaggctgaggcaggagaatcacttgaacccaggaggcggaagttgcagtgagccgagatcacgccactacactccagtcttggcgacacagtgagactctgtctcaaaaagtaaacaaataaaaaataaaattatattggaggatgtctgtatgttatatgcaaatggacttgagcatttgcagatattggtattggtgggaggtcctggaaccaatcccacacagatagagagggacaaccaactgtaccatctttcgtttatccattcatttgttattgatgtcttgggttgcttctgccctttgactattgtgcatagtgctgctgtgaacatgagtgtgcgcatatctcttttagacccccgtagtctcttctgttgtgtatatatgtagaggtggaattgctggatcatgcggtaattgtgtgtttcataatttggggacctgtcatattttttttttcattgcacctggaccatttttatgatcccccaactatatacaagaattctaattccttcacatccctgccaacacttggtattttctggttttatgatagtagccatgctcctgggtgtaaggtagtgacttcctttattttcttaaatcaatgaatcctacaaggcagctttgagttgttaattgtggggagtgccaggtcgcctgacatctttgggcaactctttttcttttctcttctttttttttgagacagtcttgctctgttgcccaggcaggagtgcagtggtgcgatctcggctcactgtagcctccgcctctggggttcaggcaattcttctgcctcagcctcccgaatagctgggattatagtcgtgcaccaccaagcccagctaattttttatatttttagtagagacggggtttcaccatgttggccaggctgctctcaaattcctgacgtcaggtgatctgcccacctcagcctccaaaagtgttaggattacaggcgtgagccactgcgcctggctgggcaactcttccctgaaaacaaggcgcccatgtgatggagcctgtgcgggtttttgttgtgcgtcccctcttgtcgcctttccttggcatgcttcccctttttttaatcctacacttgaaaattagatcaaacacaaactgtgtttagatttatttacagtttcttaactcctttcctgtttgccttttgacaggcttggcataagaagtctttttcaagtagtaaattaatttaggtggcacgcaccccacctgagttttgttacatgctggcagtttagataaatggatattataatctcagcacatttctgcccaacaccactgcacagatttgcaagagtctacaaaagtgataatattctgtcagtttggagcctagaaaaagaagaagaaggagaaaaaaaagcattttcttgttcgtatttctaggatgcctgtggggaagccggaaatgccatatagcagtttacatggctaaatacacatgaaaaaagataagggacccaaagatgtttctttgtaggcacacgggagaagagtcagttcaaattggtaattgtcagctgtgtttggagatacattctccatcgcaaccaaagatttttctttttcccccttaaactcaccatttccttgaagaatgcagtctatttttaatgactttattgatttgacgattgggttacaatgtactttatttactgcagaaatgtttcgttcctgtcagcacttaatgcgaataaatctactttttggcaccactttgatagactgtaaaactgcttatatttgcaggaaaatttgttttgccacggtatgtttatgtcagactcagtgtgactttttctcccctcaaaatcattttatatcatagtgtagctgacaaataaatacacacagtgcagtaatcattgtgtactgtcagagcagcagaaaacaaaatgtgggttttatgacagggatcaaaaaagagatttaatattcacaattaaagccacttatttaatgctttctgtttttgcttctgtattaaggctttccagtttttggttcatagtttgtatatctcttaaaaatagtaaatatacagtaaaccctacattcactgatattgtctgcatgtgaatttaatatttattatccaagaagacccaataaaagtcgatctttatttcctattgttcaaggtataagcaaagtcaaaatacatttgcaatacgataagttttctgttaagtttctttcttttcttttttttttttttttaagatggagttttgctcttgttgcccaggctggagtgcaatggtgtgatctcggctcactgcaacctccactccccaggttcaagcgattcttctgcctcagcctcccaagtagctgggattattggcgtgtgccactgcactcaaataagttttgtatttttagtggagagagggtttcaccacgttggccaggctggtctccaactcctgacctcaggtgatccacccgccttggcctcgcaaagtgctggaattacaggtgtgagccactgcgcctggcctgttttctgttaagattcttaagtttttcttgaaagcaatgtcatgtaatatatagctttgctctattataataaatttaatttgggaaggaagctgaatcatctttaaaaattttttttcatgaaacatttttcttctacaaatgttttctagtacgtattttttcttaaataagagaaatactatccattttagttatattatacatttttgttttacttatttttcataggatagcaggatataatattggcaaattgaatatcatcaaatagcctacaaccttagtcctgaatcagtactatgccacaagagaatttggaatatccacaacatgtccattatatttgcagtccatctgaaaaaataatacacaaagaccaacaaatggataacttcctgtacaaatgaacacatcagaaatatcattatgtttattgctttagctacctttatgctttaatatgattggcaattatccagtaaacttgtgccaggtaaaaataagcacccatctgggttattcaatttcaatgaacatgtaaaataatattttaataattacgcaatatttgtttttttaaatttacttttgaatgcatttaacaaactggctaggagtcctttaaagagaggtaaatgcaatcgtcaacagcatctgcaagctaaccccaaagaacccattttcagccaacttcgtgatctctcattcagattcaaatctacaatgaagtgccaaaatcatgcttttaaaaaatgacagcattagtgaaactttggaggtgcttatattgctagtgtaggcaaaaacgcacagcaatacagagctaggccgttttccttgattctttcaccataggaagaaatgaacttccagggaggtaatggagtccttctgagaaccatgattaaaagtctttgggaattatcagccaaacttaaaatggatctctaggttttcatggggagttgtgttaaaaagggactttttaatttaaaggaaccaagttgataaggtaggttcagggaaccaaaaatgttgaacagatttttgctggattgacaacttgtacggatggtgggtttttagggtggttaatcgtctgcgtctagggaaatggccacagcttgcctctccttcggggtgaaaggtaggttctgagtctgtgatttttccctgctcagagtgaataaatattgtaagtaggtgtggtcagctgtccagctctttactttttcagttgggaaggaaagagttgcacagctatgatgttcagagccaacaaggacttgcagacgccctgtgcataggagcagctgaacacattcagaatcatgtaattgagcaggctgctaagtaatggagaaaagaatatcatgcacagagatttgatgtctttttatgggagaacaaaagagtttcgattctttcacattgagtttagcctagccattgtgtggcacaggaggtttaatgaatcattgtttaactaggatcctgccaagtatttgaccattaaatagactccaatgtgtatagagttcttctctgacagactcttatttgactgtgattaattggcatcgaattgttatttaattacctccacagaaatctaagaacagtgtgtattctgattaagttatttgatgtaggaacaggcatggggctggagaggtcagctcagccctcaggactccctgctactaccaaggccaacttctgtggctgcccaaagctcacagaagatccctgaggatcaaaaattcagacagaatctggattttacctttttcttagaatataaaaaatgttttggcaactcatagcataaatttgtaaagctttttttttgcatgttgaaatcctttgaagttatttattggactgtgttaaacatgttcagtgacagttattgaggtttccttcagttcacaattgaaacatgttacgcattcccatacatggagaagaggtcagccagcaggatgcatggcacagtaggagtaaggcagaagaaagtcaatgattgcacagtctggtttgggagtcactatccttagagaatggcaccacaagggcatgagatcaccactgaggggatagagttctgagaggtggagcctctagatgcaaggggagaccacctgtgcttagcagatgggcagggtagcaggagtggaaagaggcagatattaaaagaaagaaaatcaggccaggcacggtggctcacacctgtaatcccagcactttgggaggccaaagcgggtggatcacttgaggccaggagttcgagaccagcctggccaacatggagaaacctcgtctctaaaaatacaaaaattagctgggcatggtggcacacacctgccagctacttgagaggctgaggcaggagaatcgcttgaacccaggaggcggaggttgcagtgagccaagatcgggctactgcactccagcctgggcaacagagagagactctgtctcaaaaaataaaataaaataaatttatatccctgaagccagcatacataaatatctcgaaaagacgatgatgaacagcatcagatgctgcaggaaaagtcaagagcaatgaggatgagggaaaagctggctgctgcgtttagaaatgactggtgaacgccatggtgtgaagaggagcaggaatgggactgcagagggttgtggggcgtttggataggtgaacattccccctaagatgaagatgatggtttgactaagaggtaatgtgtatcttaaactgtttataactgacagcttaggtagaattataagaatcatagtaatatttctagttcttaaaattttatctgaatttttaaagaagaaattcaatggttaaatttcccccctagctttttaatggtgtacttaaatatatatatatatttggtgtacttaaatatatataaatatatatatttggtgtacttaaatatatataaatatatatggtgtacttaaatatatataaatatatatatttggtgtacttaaatatatatatattttggaatatatatatatatatatatatatatatatatattccaaaaaaagttcatgcatttttattgaacacaacctagcacacagtttggtgtaacacctgttggcggttcccagatattaaaatgatgcgccggggatggaactgacgatcacatttgggtgttggttgatctgtttccagcacacctttggttgctttacatagggtgggtagtgggagggcccattgtcttcaagttcagtcacgttctcacactgaatgttttgctgtcctatttttgagtattacatatacttgtatgtggattagagatagagccgattttgcacactgactggtaatttccattcaaggtaatctcagtgattgaatttgatagttgcctttgtggaagtggaaattccttgtctaggtgaatgctgtataaatatgcgttgctgccaccatctctgtgggaacacattcttgtagaccgcttggtatgtctaggcccttgtttttacccctccaatagtcattcttttggagatattccatgagcatttagccgcaaacgacagtgacaggatactggagcagtaaaaactatgtcttagggattaaagtggtacattcccagaagaggtcaagagattggtgatttcttactctcttagaatcagaggttcttaatgagagctctgctgtcctgtggttcctggtttaggaatcccctgaaatcatatgcaaactgtacacatgtgcatttccaagcgaaaacactctgtggcattcattggccatgcagtgtttgagagcagtcgtcctagagattctacctgttgctgtccagggatctgtaccttctggatgctacgtgaggctgggccaggttcactcctccctggtgtattcttgagatccatgggtaaaggaaatggcctggtctgtcttcctaacttttttctttttagcaaatgtaaaataatcatcacttgctgtagcaaagcatgcatagctgctatagcaaaatggtttcccgaggcaatttatcaggtgttttcaatggcttcaaggataatcccctacaatacttcctggcaatgagtgattcggctttgccctgggtcacacagcatgttaaggtctgggatgaggtagaactggagcccctggactttcctaattaattctgccttttattaggctgcatgtcctcattcattcattcattcattcattcatttatttacttgttacaagttatggcctcctgtaacttgtgtaatttaatcctgaggtggagttattttaaatgttttactttaattatgattagccaagagagagttcctgaaacccttctaagcaggagtgatagccaaagtatttaccatccagtacagcaggcagtagcctatcagaagaggcctgggctgtcagcggctgctttggccatcgtcatttgtgtcagccctgcctggaaatttattggctaatttttattagtagacatttaatagaacttgcaaatgtgtccagtaaagtagcttgatgtcatggaggtgttgacatgagcacacctttctgaacctccaggagctgggtatgagtcacagcctggatgcctgacagccaggcatcctggaattaatttcttactgtctctgagcctccactgtatcttctgtaaaatgggaacagtatctgtgtcatagttttgaggtgctgtatgtggtttctggcactaatttagtgctctgtggggtggtcttcaaacacagtgttgagttcactcttctaggtttgtgtgcctcatttggtgccttaagaaaatggtctgggttaggatgtacctttatattattattatttttttattttattttattttttttttgagatcaagtctcactctgtcacccagcctggagtacagtggtgtgatttcggctcactgcagcttccgcctcccaggttcaggcaattctgcctcagcctcacgagtagccgggactacaggcacacaccaccatgtctggctttttttttttttttttttttcgtttttagtagagacagggtttcaccatgttggccaggtgggtctcgaattcctggcctcaggtgatccccccacctctgcctcccaaagtgctggaattacaggcatgagccactgtgcccagccttttttttttttttttttttttttaagaaagggggcatttcttgctcccttgcccagtctggagtgcattagcgtgatcatagctcactgcatcatcaaactcctgggctcaaacagtcctctccccttggtttctccaagtgctgggattgcaggcttgagccaccatgcctggcagcagtgggatgacatctccaatcatgagtgaatgaaccaagatgaccctcaggaaaaaatcttgtccagttgcctgctctcagtgaggaaggcaccgggatgagttagtgtgggctctgtctgtgcacacacaggcagaagccgagtcaatctcttggctatcttctgtggactactttctccagccaaagtcaaatgtgtaaaacgtccatctctccaaactgcacttgtgcccctcctaaatgcttcctctttacaaatatggctttgaagagccataagtacaaggaatttttagcagaggccctcaacacctgatccttttccactcccattccacacccaagtcctctcctatcagcacaccttaggtcatgctcttcccatcaactaggcaaatatttgtcatcccgtcaccctttcctgcctctcagtcctgatggatgtcattccttccacctgatcaaagtccacattcttcatcaatacattctcttccctctttccaaattctcaggccctgttcccatgagggctgaccccgcctcaccctggtaacccgcaccagctggtgatgcccccctgctgttgtgccttcctcattgccgcctgccttgggcatggtccgtgctttcttatttctgccacctgcgtgtgtgctcatgtcgggttgtgtcactctacatgctgtgctcacttacatgtatctattaacctgctaccagtgtgatcataagacactcagagagggctgggtgtggtggctcatgcctgtaatcccagcactttggaggctgaggtgggcaggtcacctgaggtcaggagtttgagaccagcccagccaacatggtgaaaccccgtctctactaaaaatacaaaaatttgctgggtgtggcggtgcacgtctgtattcccagctacttgagaggctgagcgggagaattgcttggatctgggaagtggaggttgcggtgagccgagatcgtgctagtgtgcttcagcctgggcaacagagtgagacttcgtcccccgcaaaaaaacaaaaaacactccagagcgacatcaaacaagcatcaattttaagtcatgaaacaagtaaaattttaattccaattagcaggttctgatgagtgattataggtgtcttacctgatgggtgagcagcaggaaaggaatgagtccaaagtaggagattattgttacccagaggaaggaaaacttgaagctggatgtggaaaacagatgatgaggttgccttttgccttgaagccatttgggtttttataagtcacttagtgtagacagtctcacctagcatcttccagttggggaaaaaaatgagaaggatctgattagaaaatggaagaacacatacatacttttgaaactcattttctccaatttgtcatgtcatgtaataaaacctggaaattactttttcaaaaatatgtcataattatatgaaaaggcaagaaacaactacactttgaaaacacaacacagtcctgggactacaggcatgtgcctccatgcccggctaagttttgtatttttggtagagtcggggttagcttccctagctgcggagggtttctgagaaaagcagcacagttatccgtagccggtccagtataaaggcactcgcattagtggcaggttcctgagagctacatttgtcagcaagagtttcatggaggagaaagggcgaaggctgagatcctggtaggtggaggcaagcagggactgaggaccttcatgacaggtggatggaagagagggaaggccccctgatgggaacagggacacacggccaggaggaatggaggggaggttaggaagagacctctcttctacctcttctttcctcactgtttctaaaaacttaatagctttgatttgacagatgaataaataaggatgtaaatgaggttattttaaatgaaaagtaaagacatgctggtaattatgtaaaataaagataagtcaaaaattacttacaagttttcatgctgtatgtttaggcatagatctaaggtagggtttgagaagttaggcgtgggttgttgtgggtcaatttcaaaggattctgtttagtttatttagatacgcgtaagatgttttgtaggataactgagtgtctgagtaagccctgggctgggagatcaggagtacagataagatttgggatgtataagcaaacaggaaatctttgaaatgaaagtgagcaaagttcgagaagagaatcagaaaaaggaaaaaatggtcaacagatttatccttagaaaaaaataagatgaagcaaaggatattgaaggaagttgccctgaagagtggggtttctcattcctcttctctctgccttatggaaatcccagaatggcttggcagagagttcccaccgcattagaaaacactgcatcaccttgagcaagattggcttttgtcttcacatctctaacatgaggagtttggtctacaaagtgctgtgaacatttctgttgcctgcagaaacctttcttcagaggcaatctctatgtgaaggtcccaatggatgtaaggccctatgtttgagaggggaagggcagagaagggaggagatgaggtgtctggggttgggtgtgcttggcctcctcttcatcctctgtctcattctttaagattcttcaaggcagtctcagaatcttcataagacaaggtttgaggctgggcgctgtgactcatgcctgtattcccagcactttgggaggcagaggtgagcagattgcttgagcctcaagagtttgagaccaacctgggcaacatggcaaaacctcatctctacaaaaaaatttaaaaattagccaggcatggtggtgcaccagaggtcccagctacttgggaggctgaggcaggaggatcagttgagcccagggaggtcaaggctccagtgagccttgacctgggcaacagagtgagaccttttctcaaaaaaaaaaaaacaaaaaaaaaccccataaagtttgaatgttatcagccctggggatccttcgcacccatttaagctctataatcctacaataataatacaaagaatgtctcacccatgtgagctactctagaatttagaagatcccttcataatcatgatctctttgatcctcatgatctttggccctgtgaagtagtccaggcaaatatcatcagctccattttataggtcaggaatttgagtgtcagtataggttgggtgagttgccctgtattgttgagtcctgttgctactgagcctccgaggaggataagtacctcatgtcttgtccctgcctcattttctctttcatgccttctgtgagcctctgccatgttgatggcctgttctgatgagatatactgaaatactggacttctagatctcctgtttggttctcattttggtctaagctgagtgatacaggatgtccaggctggcccatcccctcaaatggcttcctcccctcccagatcacagtgtcatagatgctgtcatccttttcagcccagcaactgtctccaggctccacccaacagcctgtactctggaccagtctgtgccccgccatgtggcaccacattgtacctggagtgcacaggtcaattctctcgacaccatttgatagactctgctctttgggacagactgcttgcatttacattctacttctcacatctcaagatagtggttcccccatcctacctttgccctttgcacactccacctaccatcaactatgggtacctgagggtccaccctctctctgtacttctggcttccaattctctgcaggaatatctaaggccaattctttttttttttttttttttttgacggagtctcgttctgtcgcccagcctggagtgcagtagcatccatcatcttggctcatggcaacctccgcctcccgagctcaagcaattctctgcctcagcttcccatgtacctgggattaaaggcgcccaccaccacgcccacctaagtattttgtagttttagtagagacagggtttcaccatcttggccaggccggtcttgaactcctgacctcgtgacccacctgcctcagcctcccaaagtgctgggattataggcatgagccaccgcgcctggctcaaaggccaattcttatcaaaagtattagttttcagaaccatcagtgaagctataagtgtggatacctataaagaagtttacaaaattgaagagttcactaaacacatctacttttaccttcaaggtcagatgtggcacctaagaccatttttgtggtacagaatgggcttaccaggaaggaatgagtggcacatgctacatcatgggtgaacctcaaaatcttgagatacgggaaggaagccagacacaagagatcacatattgtgtgattccttttccatgaaagatactgaaaaagcaaagaggcagaaagtagttgcttgaggctggggtgggcatagggaggcactgtgagtgccatgagggatcttagtgggggcataaaaatgtcttgaaacttatttttggtaatgactgcatcactcagtaaagttactaaaattcattgaattggatacctgaaatggatgagttttatgagacgtaaaatatgtatcaatgcaaatatgcctcaatatcttcatatttaagtgtacttttttgttacaaaaaagaatggggctcacagtagacatgggaacttacaagttttaaattgtagtacggttataagggaattgggaagtcttcgtcatgggagacgtatcagaattccggaggtgactttaacttcagattagattctagaatcagtttgtaaaatagagtcatttatgaatttgtattttgacaaaaagttcattaacaccttttataatattctatgttgtggaaaaaagttaggagcaacctgactctgtatgtgatattatgacttcaaaggagcttggtttctctctctctctctctcagaggaaaattttagtgtgctcataacttaatatagacccttttcagacatttcggttgtttcctgcttctgatttaccaaataatgccacattgaccatctttgatgcacttattaatgccttgagatacttcttataaaattgaattttggggtccgtggggatgcactcaatagttgtttattgtccagctcccaaaaatctacctgtgccatcatgcaggattggagtgatgtggatttacattaaatgtgagtccaaaatgtggtctggctcaaagaatttactgtgattgtgggcttagtcatgggatatatcctgaccctgagatatgcagataatacctagggtatttattttaatcctggctaccaggcattcagagaggctggctacctgactatgtgctgaggcaatggccaacatgggaccctgtgtgttatgagagataattgaggtacccaagggataggtgcctgtgagaagtctggaaaacttgtgattaactttcttcaagtagttgaagagctgccctgtcaagagaaattcgattcactttgtatggttgtaagggcagaatcagcagcaacgattggatgttcccggaaggcaagattcggtttaatgtaagcaagccttgtctaacagaacagtccgaaaatagattgggtctcctcaggaaacagtgactcctcttctctcgacatccctggagatgctccagcaggggccagatgtcatttggatgaagaggtgtggcatgtgcatggagggaatttatcataagtgtttgatttggagacctctgggaaaatgactgtgagactgtgaacttgacatcacagctctgattatgacagtttactgcgaagccagatgaaaatattctggccgggtgctatggctcacacctgtaatcccagcactttgggaggctgaggtgggtggatcacctgagatcagaagcttgagaccagcctgaccaacgtggtgaaaccccgtctctactaaaaatacagaaattagctggtcatggtggcatgtgcctgtaatctcagctacgcgggaggctgaggcaggagaatcacttgaacccaggagacagaggttgcagtgagctgagatctcctccagcctgggcaacagagtgagactccatctcaaaaaaaaaaaaaaattaaaacttttattctttttgcaaacaccagtctttgaattgtttcttagaacaaggaagtaactattgaaccttctaatcttacactttctacactgagatcattgttgataagagttttgatttcagctgatctttgacattcagttcagttattggcgtagctgtgtgaggaggtgggctttctcagttgtttttgttttccttgtattttatgctgttttccaaccatgggtctttcagattttaagatgctcccaaatggtcaagataaagggttggttttcacatactaatgatttatgtagcctttttatctttttttcttcttttcttttttgtagagatgaggtctcgctatgttgctcaggctggtcttgaactcttgagctcaagcaatgctcccacctctgccttcagaagtactgggattataggtgtgagccccatacctggcctatcttttttttttttttaatttgaatattgctttcaactttttaaaagctgaaccatacttgcaatgtttctgaatattgcctatgttaacttttccacttaagaaataattcatattttaataattatgtcttaaattttttaacttatattttccttttattggtattgatacactgagatgagaaaaaataacaagaaggacgacaaacaaaatccataagtatctgtcggaaaaatactcatttaattttaatgtttcttaagtatagctgataaaataatagcctgacctcttgccctgcatagcatggtctggcaaacagcagaagggcccccggaagctggttggaaattcaggctccagctcctccccagggccactgcatcaggacctgcatttgaaaagttgagcttcctccccggtggcatgctgcagaacctgtgggtcatagtcatcatcgcacctttttggttttggttttctagcagccatgaaaaagtacctggcgttgtgcctgggctttttttttttttttttaacaggcatgagcccgtttaatccctaggacaaccctctagaggaggtgttattagaggctcagaaaagttgtcactgggcctgccaaaggtgtcactgaatgatgctttctggagtctgtgtgtccgaagcctgagacaagaaaattgaggtgcagctccaacttgtacacactgtgcttcttggccagctggatgcctcaggagaactgcagaggctgcattagccccagcagcgggaggcagctccgtctacagcctctgaccattcatggtccacttgcagcctggtataaaggccccaggacgaagtcaatcctgacaaaccctaggaggccacacatctcatctgtaagcagggcttccggaagcgttgattagaaaagaagttcagaggcctagacacacacacttctcaggggtcacctgcatccacgtaggctatgtgtgtatagcttccatttttttgaaggaaatcatttgaaagaatagatatttattagaaaccaggtttgatctgtttgtgatgcctttatgacatactgttttcttggattctacttgacgggaaataaagtcgatgctaagcagtgatcttcagtcattaaataatatttctgttttcctgcataatttcctcttgtgttcttagataagactaagcctgtttttgtcatactgtttgcacatctgaaaatgacaacttgtttgccagtagtaaactcacagcctggaaaatgataggatcccaagtttccccaaaaatgtgaggtacagtcaagcaggctggggaaaaaaaaatacagaggttatcattatgtttatataaaaaatataccacttagcaaaagaaattctgataaagcaaaattagtgaaataattaggatcaatttctgtacgttcatctacctactttgcacttggatggaagtcctagattgggtcttaaaaggagggaacattctagaacccaccaacccttcctgatactgtcacaagatttttttcccttaattcttttaaaatcagggccacatttcaactccctgcccgctgccatttgatgatatttttgtttctctttaggtatcgtcctattttctttttctttaccactgacatcggcttatttcatatgaataatatattaaatacatatgcatttaaaatattgttttgatttgtttgcgaattgtttctcttaaagggtctatctggggaaatgagtaatttttcatatcctgttcttgcaggaagaattttaaatcgtttctccaaagacattggacacttggatgatttgctgccgctgacgtttttagatttcatccaggtaacgttgagagtaatgtcaggatctcaaatggaaaacggaagttcctattttttcaagcccttttcatggggtctgggggtgggactctcggcctggctgtgtgtaatgttaacttaataaagggccatgtttgtaaaagaaaggtgcggttataactcagaggctaagttggcatgagtaataccttgtgtgtgggagtggctatacagtcgcgtcagggttagtttgaagcagcttcgtgcttggtaagtggctctccgtctgcctctaggtatctggcgtggattttgctttactgtgaacacatttcataatacagaaacaatcacctctcacggaaagatagcctagattaactaaattatgcattgtattaccacaaagggcaaatacttaggcactttttttttttttttggatagaaccaggtgtggttacttacaaagaaaagattagtaataataaggtgaaaataatactttattaacaaggacaatagagagcagttattgcggatacaaagcctttaaaggcaaggatatctaagccaatttgagtacaggatcaaagtcaactcagaaaatgtcttttttgttttcacacgttgattgctctaagtcttaagctgtctttaaaaaaaaaaaaccaacaatcctacagaaataccttctgtaaaacttttcttttgtttgtgaacttgaggctctaaaaaataatattgggtcatctctcatctccttattcagtactgttgctcatgtggtttggttttattttattttttcctattgtttaattttgtctacttgtcagtggttcaagctggggcactttttttttcccaagtgtttattttggaaatgcatctattaaaagctatacatattccaaaatctcagctgctgttgctaacactttatgaaatttgaacctctgtgactttttctaagtgccaacttagaatagttgtaatcattagctgaatttaaagccattaaatagaaatactacagttggggtctgcaattttggcttgatcctgtgatccccctacccctgcttttttctcaatgctcagatgctttagatctcctctggagccacagttataaaggaagcaaaattacttaatttggaaaattagctatgtaagaaaaatcagtcataggcttgaaatgcttataggaattcctgtttgtcacacagcaaggcagcaaatgagcatgtgactgcaaacagtatagcccatgggcgaaggcatccactgtttatggaggtgaagtaagctgagactcacaggtggattatttttactgcaaacaaggacctctgatttttttttttcttttgcaaacatttttaaaatgtgccctcctgggtttagctatattatttatccctcagaagccatcactaaaacagttgccccgtttacatagaatgcagattattgtctgtacacgttttgacagggattgttaattacttcaagaagattttgtgaaagtttctgtttctttgcaacaggaagctaggcaaaggttgagtttccgaagctggctggcccactatgtgcttagcagagtgagcggtcgtaattagtatcccttatgtgctttgtctcacatatggagggagagggatggatgctacttgatgtcaatataaaacatttcttagaagcatgaggagggaaaattctagtctcgttgtacttctatttaaccagagagacaagggcgtttgttattatccactcacataatcttggtaaacttaatgttgtggaatcctactggccccaattagctgatttcttgaatctacagcgaaggttaaatcctaatgttattgtctccaagaaaggagttttatctaaaggataacttagttatcaattatgataaagatctattgtcacttgttttgtttgcaggtgtctttaataaggcttcccataatcccttcaggaagaaatattttctccttttaaaaatagtattagctaaatataaaagctctggtccctgccattgttgttgattctttgagggacatttcccaacattcattgtttaaatggttgtcaggaagaatcaagtgaaacgtggtaaacaatgcagtaactggttcatcttactttgtgtgccgagcctttctcccggggatttgcattcgatgagtgggcttttgactgaggtatcgccaggatcattttaaagtatttgggcctgttgctatattaggaagtgaaaatttttattaaagccacccacccaaaaaaatgcatttaacctgccctcaaataaaggccaacaaaaatctaaatgtaattttttttttttttttttaagttgcctaggcctctctgtaaggatgaaaacagcccagtgctgttctgggactcttaatggaatcatgtaaacttaaaataaacactattatggtaagcacatagaatgaaaactaattttccaaatcaaatacattatattcaattcattttccccaatcaaccaaatgtttaaaacctgttagttataacagcaatcttctggaaattaattagaagcctattagctctgctagctgagccgaatgaagggggttgctcggtacatttctaagtagtctcctgaattaaagcaaagcaaggtcaaaatgacagttagctttgttcacctcatggctttgcttaaagtcgttgatcttttaggggggaaggagggaggtgttttgttttgcaaaggaaattttgtctactttgactcagttctgtgatacatttttaaaatttatttctagagccagtggggtgagccatacaggaagcctgatgttatctgtgtggatagtagccttctccattgcatgggcatctgaaatggagttgaattttaggcctcgtctaccgcatcaattcttctacagggtttatttagcccctttcaaaattcagatagtaggaaatttcctggatgactttgtgtttaacatccttagcaaaacatgcttcggacactggggccctgggttttgtggctgtcatcaggttctatgggtaataaacatgctgctgacatcacgggccctgggttttgatggctctcgttaggttcaataggtaataatcacagtgactagcagttcctcctaagcccagagaaactcacagaaagtgaggccttctcaacccagcagctgagattgactgaaacaattgagtttaaaaaaactggaaatttctttgtcaagatgttacccttggtgttatctagctgactgatcgacaggggaactacgtatcatcagaaccaactacggatggtattcttgagccagaaagaactttggcaggatgtatagtaacaaatagaatgaagattaaaatccacagaaaagttaggtatcttcataaaaagggagttgaaattctacacttaccagaacattcagactaagactgtcgagttgttattcttactaaagctgagatttaaaatcaaatagctatagaaataaataatgtagttgcatttatccatgtgactttcttttttttttttttgagatggtctcactctgttacccaggctggagtgcaatggtgcgatctcagctcactgcaacctttgccccccaggttcaaacgattttcatgcctcagcctcctgagtagctgtgattacagatgaccaccaccactctaagctaatttttgtatttttagtagagacagggttttgccatgttgctcaggctggtctcgaactcctaacctcaggtgatccacccacctcggcctcccaaagtggtgggattacaggcatgagccactgcacctggcctcatgtgacctttttaatccagagcattcatgtttgattacgttttctgtatgatggtgatcgttttattggttttgtaagtaggagtctggaactgtggaccattgggtcagaactgaactgtttccaattgagtttgccaaagactggaggggtagatctgagaggagaaccctctgcttgtggcttggtgtctagaatgtaggctctgtagaagcaagtctgaaaccatgcacagattttattactctcccgatgaaatcgctgagataaggaaattctggtttacatgtgaccagatttgctggccagatagaggcaattaacctaactttgatttttggacttcaataaaatatttgtatttgtgagttttcatttgtttttatatagttagatgttggcactcattgcagatgggaacagtgacactggtaacttaaaagtgggtgtcatttgctgtcctgtattaagggaagaaacccagaggggcagcgagggtaatgtgtcactttggaactcagattggctcaggtgtgcaacagtagtgaataaagaaaggtgaggtttttgattaggccttttggaaggaaagccagaattaagggaagtttttgaatatatcataagatataaatatatcactggaaataaataacttatagaatacaaatgaacagtctgcaagttacctcaaggttgccatgggctaatcagataatttagccaaggctggcagtgcacatctggcttataaagagttgttcaaacatgtttttcttgtctgctttttcaaaacttgtaacagctttgaacatctacaatatttctaaagccaagtcatttatgaacatagaatggctcttcacaggttaaaagtgaatatcttgttttcataaagaattgaaatacaaatagcataaagatcttcatctggaacttatgttctttgaataggaatttggcattcaaaacatagtatgtttgcgtaaatcaacaaacaaaaacatagagatgatagtcaacattcacattttaaagtgcttgattacttcctttttttctgtggttttttttttttttttctttctttttttttttctgaaacagggtcttgctctgaagcccaggctggagtgcagtggcgcagtctcagctcactgcagcctccacctcccgggctcaagcaattctcatacctcagcctcccgagtagctgggactacaagtgtgcaccaccatggccagctaagttttgtatttttagtagagatggggtttcaccattttgcccaggctggtctctaatttctgaccccaagtgatcctgctgcctcagcctcccaaagtgctgggattacagacatgaggcactgcgctgggccagaagtgcttgattacttcctaatatcagcaccaatgccagcatcatgaatctcttcttccattttcttaaaacaataattggattaataggtaccctacctgtaatatttgtattaataatatcttattagcattttaattagaaatttaatattaatgatttggaatcagtagttttcaacaattttaatagtgcaaatttatttgtagtatttgatggggagatatggtgttttgtgactatatttacaactggatgtatctgggaatatctcaaagtttctcccaaaaggaaaacatttctattacaaatatgtgacttgtgaaaataatttgtaattcttttcaatatatctcattttttttttttttttttgagacagagtcttgctctatcacccaggctggagtgcagtggggcgatcttggctcactgcaacctccgcctcctgggttcaagcaattctcctgcctccgcctcccgagtagctgagattacaggcacccaccaccacgcctgtctaatttttgtatttttagtagagatggggtttcacgatgttggccagactggtctggaactcctgacctcaagtgatctgcccgtctcggcctccaaaagtgctgggattacaggcgtgcgccatcacgcctggccaatacgtgtcattcttattacatgtcttcctttttatttttttttcccaccagctttttattgagctcctactatatgctgagtatgcagaggtggaaaagatagaggctttatcttcatccacctgagaagcatttattgagtatcttgggtgtactaggccccatgttgggcttggagatatggggctaagtgaaattgaattcccttcttctatgagtttactctattgggagggacagatagaaagcagttaccatgctgtgtgataagacttacaatagaagggatactgtaggagagaatggttaaggtctcagcacgagacaaatttccaatcctagctctttcactttaagttcaattatggcttcctccaagactggccatgcaacacctaatgctggagtgaggactcaaaccctcttctcacagtgcagccatatgttagaataaatatctaaatagatttgttttgctttgcttgcctttgatttgtggctacaaaggacatacaaagagcaaaattcaaattttctggtccttaaatctaatctctctttaacttttggaaagaaactatgtgcatgccagactgttggcacctgtgtgtgtgtgtgtgtgtgtgtgtgtgtttgcacacctgtggctcaccctcaaatgtacccttctaattcttcatcctttaaggaccagcgaaagtctctctttcgcattagtgatgcttttctttaccactccattctgtaataaaacaatctctaggtcctgtaaaaagaagggatcatataacaccaggctgagcactgctctgagcatatttcacttgccccatctcatttaaacttcactcatagtcgttgagtcaatcagtatttcttggacacctcctgtatgccaagtacttttccaggatctagagcatggagcagttaactgggtatcagcttctaggaattggcattctagtgcaggaggtcgacaataaacagaccaataaacataaataatctaagttagtataggtctagtgtgttcagcaaaggaaagtgtttgctaatgactggaccagcatagtcaaggaggaggtgacgttgagtttgaaaaataaggaaacagccgtgcaaagaagatatgggggcaggttgagggaggggcacattgtatggaggaggaacaggtgccaggtctccagaagggaacaaagtggcatttcctcaggcagagagatgccaagcatgagcagggtacctgtagtcccagctacctgggaggctgaggcaggagaatcacttgaacttgggttgtagtgagccaaaattgcaccactgcactccagcctggacgacacactctgtctcaaaataaaataaaaaaaaaaaaaagaaaatagatttaacggactcacagttccatgtggctggggaggcctcacatggtggaaggtgaaggaggagcaaaggcatgtcttacatggcggcaggcaagagaacatgttcaagggaactgctgtttataaaatcatcagatctcatgtgacttattcactatcacgagaataccacgggaaaaacccaaccccatgattcagttacctccccctgggtccctcccacaacatgtagggattatgggagctacatacagttcaagatgagatttgggtggggacacagccaaaccatatctatcactaagtctctaataatagattatttgtcatctggtgcccacccatctccctatagaaagtcatataatgctcatttaatatgagcctatgatattttagatataaacctttcagaaattgtggtactagcctttttttcttaccccctgtgtctttagaattaaaggtagacaaacttagtttcctttccccaaaattcttttagacattttgagtggtcagtaagattcccagctgtggagactactcatttaaataactttattcctggttttatgataaacctggtctcaaacccaggtaccagagaaactgtgactgttttttagatatgagcatctggaagctcaggagagagaggacactagattttcttttctttctttcttttttttgagatggggtctcgctctgtcgcccaggctggagtgcagtggtgtgatctctgctcgctgcaaactttgcctcccagcttcaaacaattctcccatctcagactcctccacagtggctgggacaacaggtgtgtactaccacgcctggctaattttattttttggtagatatttggtagatacagggtttcaccatgttggccagactggtctcgaactcctgacctcaggtgatccactcacctcagcctcccaaagtgctgggattacaggagtgagccaccatgcccagcctatatctttatctacagtattctgatgcacctttgttcaggttgtgatatatatagctctgtggtaatactgtataaacaaggaaaaacaattaactgtggcaaaagcaaaggcacatttctatagttactgttaaaaaataactttacattaaaactttgtaacaactggtgattgtacattgtactaatattattcactggaagtgcattctttatagaaagttacataagtatactaaagagttaaatttaaatactataaacatatacagtacacagcataaatatttttgtgaaataaaaacacctcatggtttaattaaatggaatgtttctgtcacaatttatactttgaatactctagttttgttttgttttgtttttttgagaggagtttcactcttgtcaccgaagctggagtgcaatggtgccatctcggctcactgtagcttctgcctccctgttccaagtgattgtcctgcctcagcctcccgggtagctgggattacaggtgactgccactatgcctggctaatttttttatttttagtagagatggggtttcaccatgttggccaggctggtcttgaactcctgacctcaggtggtccacccatatcagcctcccaatgtgctgggattacaggcatgagccaccacgcccagcctgaatactcttaaaaactgtctgtaaaggatctgaactcccccacagccccatgtatttgattttagacaacaaagtctgggtgccttatttcatgtgtgaaagagaaatagaatctcaggtcccagactccctatgccaaagggaaagttaagcttgggaacagagtcaccagtaccatctttcttttgttcccaaacagccatgatttcacaaccctactatcctgtgtcactgcctcatttcctgtactccctcctttatcttaatataaaatacagatcgactgagtgtgagacaatgcacaatccacattttcttctactccctcttttcacatgtaaaatgtagatatactggggctaatcagggtctcacaagaaggtgaccatctcactgtctaccctccctccctttttcttttttttatttttttttcccttctgcttgctcttctttaaatactgaagtttacaaaactccctctagaaaaaagcatcacagatgcccctgccacattctcatctgtggctaaataaacctctaatcgattgagacctgccttagttactttttggttaaaatatacgtgtgtgtgcgtatatatgtatatatatatacgcgcacatatatacgcacacacacgcacatacccctcaagaagcaattaaaccgttgatatgtaatcttccaattaaagtagcttgatgcccatcttaaactgtaaattgaggaaaataacatttgtggctgtaatagatgatttatgtagggctctagggcagtcggagtctacattttagccagccttgtaaacttgtgtatggaattcatagttgaacctatagagagctgaacccctctaaggtctttgagcagctaagtggcagctcatcttgtaattttaaggttaaacaaggatgtgtgatgtgtgcacatgcatctctctcctttagagacgttattcccagttgatgggctttactgaaaatcagcgaggccggtaaccggcttaccctgtgcacacgtggtggttgtcctctgagttgtgcctggttgcttcctgaaaagggtcgttttcagagttctccctgctctttgcggtcacctgaaaaaggtctttgtggcagtggatgtctcctctatcttgctgttatcatcatcatctgcatcagcatcttggggttggacagcagatcactccattccaagctatgctgttgggaggcttcccttggctttggaactcttcacttaccccattgcaattcagtgtccagcagtgccgaggccactaggcttagtcaccatacttctgcctggtggaaacctgattgtgtttcaggtttggctttgttgtatgaggttttctgttttcgggagaattgtggatggagttagtgaaaccaatagcagcactaatggagctttatgcacatttgagtgaaactgaaagttaaggtattaacttctaacttgtccttgaacctccaggggtaaatgttaaatttattctttaattttcttgctaattagtgctctagggaggatgaagaagtgaacaactactcttgttgactaatccagtggtccccaacccctgggccacagaccagtactagtctgtgtggcctgttaggaacctggccacacagcaggaggtgagcggtggacaagaaaacaaagcttgctccccatcactcacgttaccgcctgacctctgcctcctgtcagatcgtcggcggcattagattctcataggagcacgaaccctgtgaacattgtgaaatgtgcatgctagggatctagcttgcatctaccttatgagaatctagtgcctgatcatctgtcattgtctcccatcacccccagatgggaccatctagttgcaggaaaacaagctcagggatcccactgattctacattatggtaagttgtataattatttcattatatattaccacataataatagaaataaagtacacaataaatgtaatgggcttgaatcatcctgaaactacctccatcgccatccatggaaaaattgtcctccgcgaaaccagtccctggtgccaaaaaggttgaggactgtgttctaatccacttgtttgttttcaccaccttctggattcacagcaccctccactccacctgtagcacatgcctgccactgggctgcctctggcggaccccattctctgccccaatccttggcctcattatgcttcctcagagtcagttgtgattcttcctcaacgtattcatgctacttatccttgttactgtaattttgtgatggcaatacttatcatataaactgatgaaacaggaatgccacaagaaagatttgtttgacaagtcgaagccttgggaaagaaatcttcactttaaaaaattgttaacaaattatgtgtggatgagaataaatggggtggagatgagaattggaggaaaataggattgtgtgctaatagcttcacatgtgtcttaaaattcatagatgatgtattatgtgtgtgatatatacataagaaagaccatgaaaatctccaacatcagacccggacatgttttttcatgcctgtaatctcagcactttgggaggctgaggagggcagatcacttgaggtcaagagttccagactagcctgaccaatgtggcgaagccccatctttactaaaaacccaaaaattagctgggagtggtggtgcacacctgtaatcccagctacttgggaggctgaaagaattgcttgaacatgggaggtggaggttgcagtgagtcaagatcataccactgcactccagcctgggcagcagagagagactccatctcaacaacaacaacaaaaaaacccaaaccaaaaaaacctcaaaaccaactttaaggattttgtattgtgtatcccttatttccatgctggccaaatacaagttcacatcacagcagcaaagggctttgtctgttgccctgcttggggaagctggtaaggcttcctggttattcctgagccatgtaggggagaaggaggcacatatggcaggaagtgcaggagtttaggatatctacagggacactgcagtgtggaatagctgcatcaggaggtttgagacaaggcattagaggagatcagatggagagatgcagaggggccagatcacaagaaggcttgtttcttaagcacaggaatttagagtttagagatttgggtggaaggatatggagaggaatgggagactgtcagaaagatggggttgtaccagcatcaggaaaacaagaaaggatactggtttggacaagtttctctttaggacatccaggtcagaatgccttgtgtggctaatgaaagcccttgcttctgaatagggggcccacactgcaggatagtcgatcccctcaggcatgtgtcattcacaaggctgtgtcccagtagaaggccagttaggtttgcacacctccgtgaatgctttactagatcaactgttaaagctgtcagatatcttgccaatcctgtcaaattatagttgcttgcaaaattggagctgttctcaattccaaaattaaaaggaagccagcatcatttatgtggtctgtttagggtgattctacctcaggatatcagagccatgaaaattccctttgcaagtgctcttggttctctaggaaaagcttcaggttttgtttttgttttctgtttttttgtttttgagacggagtctcgctctgtcgcccaggctggagtgcagtggcgtgatctcagctcactgcaagcactgcctcccaggttcatgccattctcctgcctcagcctcccaagtagctgggactacaggtgcatgctaccacgccaggctaatttttgtatttttagtagagacagggtttcaccgtattggcccggctggtctcgaactcctgacctcgtgatccacccacctcagcctcccaaagtgctgggattacaggcgtgagccactgcgcccggcccagcttcaggttttaaaggtgtgagtgttgagtgtgctactgtgaataagattagatgtgactgggccaggtgtggtagttcacacctgtaatcccagcactttgggaggccaaggtgggtggatcacttgaggtcaggagtttgagaccagcctggccaacatggtgaaaccccatctctactaaaaatacaaaaattagctgggcgtggtggcgggcccttgtaataccagctacttggggggctgaggcagggagaattgcttgaatccaggagacagtggttgcagtgaaccaagattgtgccattgcactccagacagggcgagactcgatctaaaaaaaaaaaaggtgtgactagatatcacttgtaagtaaataacttcaaagtataatgtaggggccaggtgtggtggtccatgcctgtaatcccagaactttgggaggccgaagtgagaggattgctcaaggtcaggagttcaaaaccagcctgggcgacatagtgagacccccttctctataaaaataataaaagactttgccagagatggtgtcttatggttgtagtcctagcaatttgggaggccgacctggaaagaactcttgaacccaggagtttgagaccagcctgagcattatggtgagaccctgtctctacaaaaaaataaaacaattagctaggtgtagtggtgcgtgcctgtagtcccagctactctggaggctgagtccggaagatcacttgagcccagaagttcgaggttgcagtgaaccacagttgtgctactgcactccagcctgagcaacagagccagacccagactcaaaagaaccaaaaaataataataaaaaatttcaagtgtagtgtaggatggaatgggagaggcttggaatcatccttcttaagtttgactcctagctctaccgcttaccttctctttcctcacaaagccacatgctacgtctctgtaaaatggagaaaattctacctattccatgagggttattgtgaggataaaatgaagtcatttcaataacattcttagcataacatctaagctcactaaataaaaggtactttttaaatactacgtatatttttaagtgggagaaatagcctgacaatgacattatgctgcattaaggtaattgtcagacagttaccagacccataagtattaggacatgagtttgtattccagatattaggtttattatccctgaaggctttaatggctattttctcttctggaaccacagtatcaaaatcagttgttttcagaataaaccagtgagcactaaatatctcataataacgtaattttcataatattgctgaaacttccttggcccttgataacattgagtgtagagtctgagttatctagacttctgctagctaaaatctttgcctctaagaagtcttcctactagaaaaaaacaaatgaaaaatgaagataagatgcagaggttggatttaggcattttaattttttctgtttaaatttgggagtgctccgagtgtgctaacttgcacacagctgcactcagcaaaatactgtaatatattgaggcacacggaattgcaaaacctttcttccctacacacccctcatctaaaaaaaaaaaaaaatcagcagcttgactgagcttaaataactgacttttcatatcctttcatggaacacaaaggactagtcctgaggctacttgagccaccaatgcaggcagcagtggagaccaccactgaatgtgccagtccctcctcccacaaacaaaacacattgactgcagctttatgaagtgaaatgcccaagaaaaagaaaatgtgaaggaggtgtcctcagtcatttcttccctaggggggtgggagggcaggatgaggggcaggagaaaaagctgctgcatctggatgtggagaacaaagccatcctaagacttgagtataataggttgggtcactcgcttttatagaagcaaaagagtggaactgccttgacttgtctcagtaccactgacccttacatttcattgtgtagagatgtcagggaaagtgtgtagaaagcacactgaacaatgactttgtcattttgagatttctgaggtttgttcaccccttcccccaactcctaccctcaaatccccattggacaaaagagatcgttagttaggtcgccttgccgtcatttgaaagatctctgttttactgagtctttcaaaagtaaactcatccattttaactgaatcacggcgttctcatgctttcaaagtcaacaaaagagttttagtcactgcatttacaaggatggactagtctgtgaaaatgccagccctagagataatgattcatgccaactgccacattaaagtggatttccttgttaatagacagggcagttgatgacatgagttactggaaatatttgccaactcttgacccctggatttctgagatcaggatgataggattcacacaggcccactctaacaattcctttaccttttcttttttaatgaaagatgcaatggttgggttttttccagtgtgatagcacatgtagaaagcagtactgtcaccattagtgtggtgacagttaatcactggggaccctcccaggcttcccaggctggcaaccagtgttccaatttttcccagcatgtgtgttccaatgataatgtttgtagtttaacaagaagctaattaagacctaaagaaaaaaattaagagtctcatttttatcaagtctggtggtattcagcagagcatagaactttccattctggcatattggatgatgtccattgcaaaacaatagtggccattcgtggtgctttctcttcttgtcattttgcatccttagtaatgataaaatggacagctattacccaggagaggaaaatggccaaatgtttacttaattgaggacctttaaattctctctatgctattcttgattgattacattcatttttgtctgtatacctactgagttttcttgataagatgaacaaaaaaaggtttggactggagaacttgcctgagttttattaaaatcttgcagtcactattttctatatggatgtatcacttccatctgatgtggggcatgggtaagtgtaatctgttctacttgtgagttttgtgactcacttgttttctttcagccctttccctgggttcattgacttagtgttctctctcatttgcgttgagtcatgaagccgatagtgccgcttgtgcatcgcagcaaagggccagccacctatgggacacgtatcaaacatggatcaggagccatttttgttctagggcacatgggctggttaccattagttctcacatttgccctttcccaccctcaatgcacctgaggagatcatctcttagcgttatggttgtgtattgatacactgcccaacctctgcctgaacatggccaaagggatgggaatgaaattctagtgtcatattttttttaccctatctatttttattgaggtatagtttatatacaataaaatcgacagttttttttaggttgaattttactaattgtgtacattccaatatccaccctctaaaacaagatgtagagcatttccatctcctcaggaagtctcctttgctcctctgcagtcaattttcacacctctacacctcttccagatttctgtcaacatcaattagttttcctgttcttgaactacgtataaatggaaccaataatttttctgtggctggattcttttgttcaccatgtttttgagttctgtgtatgtttcagtggttcatttctttgttttctttttctgagtgatatttcattgtatgatgacatcaacatttatttgtctactctctgattgatgggtatttgaattgttgccagtttttagcaatgaatgttcttatagaagtgtttatgggtacactacatatgttttcattcatctcagataaaatgcataggagtggaattgctgggttcgtaaagttcactttaaaaaccaaaaatcaaactatgacaaggatttttataatggttgtactattttacacacccagtggcaatatatgagcattctagttgctccacatcctcgccaacatttagtatgatcaatctttttgtttttattctttttagtagagtatagatgatccatttgcattgccttgatgattaatattgagctttttccatacaggctaattggccattcaagtgtcttattttctgaaatactggttcagatctcctgccagctttttaaaacgtgtttttaaaaatcttgttgattttttagtttttaatatacataagtgtatttgtatatgtttaatattaggcatttgtgaatatttcctgttttgcaaattgtggtttttaatacatttgcttatttcgtcttcactggagaactttttgcatgaaactgttcataatctcacatttgtccatttaatgtctttataatctatagtgaaatttcttcttttattcccgacactgataatttgtttctgtcaatcagtttagcttggagtttatcaattttgattttttttccagtgaattcatgtttgattttgtaattttctctgtagttggtagattttctatttcattaatttcttatattttttaagttacattgatttaatttatctttttctttagctttttaagattgaacattaatctgttggttttcatttgtttcataatatatgcatttaaagttatacttcctctaagtattgcttagctgcatccaatgattttgatatgttgtgttttcattatctacagttcagaatatttatgagttgacttttttttttttttttttagacagtatctcactctgtcgcccaggctggagtgcagtggtgcaatctcggctcactgcaacctccacctcccaggttcaagcgattcttgtgcctcagcctgttgaatagctgggattacaggcgcacatcaccacacccagctaatttttgtatttttagtagagatggagtttcaccatgttgcccaggttggtctgaaactcctggcctcaagtgagcctcccacctcagcctctaaaagtgctgggattataggcgtgagccactgtacctggcccatgagttgactttctgaagtaatattttagtagtgagttattatggagtatataacttcatttctaaagatttagggattttttttttttaaaaaaccttactgctactgatttctaattagccttgttgtaattcgataacatattctgtaatatttctaacctttgaaatgtattgagacttctttaatggcccagtatttactttactttggtaacggtcccctgtgcatttgaaaaaaaaaaaaaaaaaaaaaaaagaatgtatattctgtagctgtggagtatagagttctaaaaatgacaggtcaagttggcttataatatctggatcttcagtatctttactgaatttttgtccactgttctgtcatttactaagagtggggtgtttttgcttggtatctctctctctctctgtatttacagtctttgttgtaagcagcatctaattaggtctggctttttaaatgctcagctgaaattctctgtcattttatgtggagtttcatccatgtacatttaatgtaattatagatatggttggttttaagtctaccatcttggtatttgtcttctgttagtctcatatgttcttttccttctttgcagtgaatagaatatatgttcttattttttctatcacatttttagctctactctttatgttattgtttttagtggttgctctagagtttacatatccatttaagtttattgcaatctattttcaaataatttcctaccaaatttgcaaacaatagaataatcttactattatataatttatttctgctattctttgggcttatgttgtcatattgtttacttctacatatgctataaacttcatgatatattgggtccattttgctttaaataaccaatggtcttttaaagaaatttatacatatgtatgcatgtatgtgcatacatattatagaaaattgtgttttatatttattcacatatttgtcctttccagtgctctttatttctttctgaagtctgagcttccatctggtatcattttccttaagcctgaagaacttcctttcaggctggtctgctagagaccttctcctagcttttgcccatctgagcatgtctttatttcaactttgtttttaatgatcttttcaacagatagaagattctaggttgacagttttctttttttttcctttttttggcactgtacatatatcacatcattgtcttctcccttcattgtttctgatgagaaaccatcattattatgcttgttgcactatacattatgactcttcatggctgctttttaaaacaatttcctctttgagtttttgctgtttgactatatgtgtttagtatccttcttgggattaatgagcttcaatatatgggttggtatttttatttaattttggaaaattatgagtactttatgttttgatacacttttcttttctttctcttttaactccttaacttctgggactgaaaatgatagtatgttagactgtttggtgtagctccaagatctagggtgttgcattccagtctttcagtcttttttatttttgtctttcatttggataatttgtattgctctgtctttagggtcattgattctttctcttatcccaatctgctgccagcccattgaatatgtttttttttttctttcatagagatgggatctcgctgtgttgtcctggctggtctcaaactcctaggctcaagcaatcctcctccctcctcaagcaaacctcagtgctgggattataggcatgagccactgtacctggctaaatgttgtttttttgatattcaatttttgtttatagaattttcatttgttttgctcttatacttttcatctttttatgtttattgaccaattaaatatcatttgggtaagcacctatttaagtgtcttaacaatttttctattgagtactctgggtttttgttttgtttttcttactgatttgtagaattctttatgtattctgaattgcagataccttccttctgtactaatgcttatctttttagccctgtaatattgtgttttcataaacatacttatcaatcttttcctttatggtcattgatttttgtgttctgtttaaaaaaatctgtatctatttcagtgtcttatttatttatttgttagttttccataagttactgaggtacaggtggtatttggttacatgactaagctctttagtggtgatttgagagattttggtgcacccatcacccaagcagtgtacactgcaccatatttgtagtgttttatccctcgccctcctcccactcttccccctaaacccccaaagtccattgtatcattcttatgcctttgcatcctcatagcttagctcccatgtatcagtgagaacatacaatgtttggttttccattcctgagttacttcactcagaataatagtctccagtctcatccaggtcactgcaaatgctgtcagttcattcctttctatggttgaggagtattccatcagatagatagatagatagatagatagatagatagatagatagatagatagataatctcacagtttctttatccactcattgattgatgggcatttgggttggttccatgattttgcaattgtgaatcgtgctgctataaacatgtgtgtgcaagtatcttttccaaataatgatttattttcctctgggtagatagccagtagtgggattgctggatcaaatggtagatctacttttagttctttaaggaatttccacactattttccatagcgactgtactagtttacattcccaccagcagtgtagaagagttccctgatcactgcatccatgccaacatctactgttttctgatttttttattatggccattcttgcaggagtaaggtggtatcacattgtgtttttgatttgcatttccctagtcattagtgatagtgagcattgtatatcttctttccagaattttctcttcatgtcctaagtccactttctgatgagatttttttttcttactgatttgttctaattcattgtagactctggatattactcctttgtcaaatgtgtatagattgtgaagatttactcccactctgtgtgttgtctcttcactctgctgaatgtgccttttgcggtgcaaaagctccttagtttaattaagtccctactatttatctttgtttttattgcatttgcttttgggttcttagtcatgaaatccttgcctaaaccaatgtctagaagggtttttccaatgttatcttctagaatttttatagtttccaggtcttagatttaagtctctgatccatcttgagttgatttttgtataaggtcagagataaggatccagtttcattctcctacatgtggctagccagttatcccagcaccatttgttgaaaagggtgtcctttccccactttatgattttgtttgctttgtcaaatatcagttggcggttaagtatttgggttctctattctgttccattggtctgtgtgcctatttttataccagtaccatgctgttttggtgactatggccttatagtacagtttgaaatcaagtagtgtgatgcctccagatttgttctgtttgattagtcttgctttggctctgcgggctcttttttggttccatgtgaattttagaatttttttttttaattctgtgcagaatgatggtggtattttgatgggaattgcattgaatttgtagattgcttttggcagtatggtcattttcacaatattgattctatccatccatgagcatgagatgtatttccatttatttgtgttgtctatgatttcttccagcagtgttttgtagttttccttgtagaggtcttttgattccttggttaggtatattcctaagtattttattttattttaatttttgcagctattgtaaaaggggtttagttcttgatttgattctctacttggttcctgttggcgtatagaagagctactgatttgtgtacattaatcttatatctggaaactttgctcaattattttatcagttctaggagctttctggaggagtctttaggctttccaaggtaaacgacagtttgacttcctctttaccaatttggatgccctttatttctttcttttgtctgattgatctggccaggacttccagtactatgttgaagaggagtggtaagagtgggcatccttgtcttgttccagttctccgaggaaatgctttcaacttttccccattcagtatcatgttggctgtgggtttgtcatagatggcttttattacattgaggtatgtctcttgtatgccgattttgctgagagttttaatcttaaagggatgctggattttgtcgaatgctttttctgcatctattgagatgattatgtgattttttggttttaattttgtttatgtggtgtatcacatttattgacttgcatatgttaaaccatctctacatccctggtatgaaacccacttgatcatggtggcttatctttttgatatgttgttggattcagttaacaagtattttgttaaggattttagcatctatgttcatcaaggatatcggtttgcagtgttctttttggttatgtcctttcctcgttttggtattatggtgatgctggctttatagaatgaattagggagggttccttctttctctgtcttatggaatagtgtccaaaggattggtaccaattcttctttgaatgtctggtaaaattctgctgtgaatctgtctggtcttggacttttttttgttggtaatttttaaattaccatttcagtcttgctgcttgttattggtctgttcagggtatctaattcttcctgatttaagctaggagggttgtatttttccaggaatttatccatctcttctaggttttctagtttatgtgtgtaaagatgttcatagtagccttgaatgatcttttgtatttcagtggtgtcagttaatttttctctcttcttttcttggttaatcttgctaatggcctatcaattttatttaccttttcaaaaaaccagctttttgttttatttatcttttgtgttttgttgttgttgtttcatttcatttagttctgctctgatcttagttatttcctttcttctgctgggtttgggtttggtttgttcttgtttctctagttccttgaggtgtgaccttggaatgtcagtttgtgctctttcagctttttcaatgcaggtgtttaaggctatgaactttcctcttagtactgcctttgctgtatcccagaggttttgataggttgtgtcattattgtcattcagtttgaaatattttttaatttccatcttgatttcatttttgacccaatgctcattcaggagcagattatttaatttccatgtatttgcatggttttgaagattccttttggagttgaatcatatggtctatcttggaaaaagttccatgcactgtcgaatagaatgtgtattctgcagttgttggatgaaatgttctatttatgtatgttaagtccatttgttccaaggtatagtttaaatccattgtttctttgttgactttttgtcttaatgatctgtctagtgctgtcagtgaagtattgaagtcccccactgttattgtgttgctgtctctcttatttcttaattctattagtaattgttttataaatttgagagctgtagtgttgggtgcatatatgtttaggactgtgatattttccttttggacaaggccttttactgttagataatgtccctctttgtctcttttaactgctgttgctttaaagtttgttttgtctgatataagaatagctgcccctgctgtgtttcatgtcgatttgcatgaaatcctttttccacccctttaagtttctgtgagtgcttatgtgttaggtgagtctccagaaggcagcagattggttggtgagtttttatccattctgcacttctgtatcttttaagtggagcatttaggcaatttacattcaatattagtgttgagatgtgaggtactgttgtattcatcgcgctgtttgttgtctgtgtactttgtgttttttttgtttgtttttgctttttaacttgtatttttgttttataggtcctgtatgatttatgctttaaagagtttctgttttgatgcgtttccaggatttgtttcaagatttagagctccttttagcagtttcttacagtggtggtttggtagtagtgaattctcttagcatttgtttgtttgaaaaaaactgtatctttctttcatatgtggagcatagtttcactggatgcaaaattcttggctgatcattgttttgtttgaggaggctgaagatagggccccaatcccttctagcttatagggtttctgctgagaaatctgctgttaatctgataggttttcctttataggttacctggtgcttctgtctcacagctcttaagattctttctttggtcttacctttgggtaacctgatgacagtgcacctaggtgatgatttttttcaatgaatttcccaggtgttctttgtgcttcttgtatttggatgtctaggtctctagcaaggctgaagaagttttcctcgattatttgcccaaatatgttttccaagcttttagaattctcttcttcctcaggaacactgattattcttaggcttggtcgtttaacataatcccagacttcttggaggttttgttcatattttcttattctttttccatttgtatttgttggattgggttaattagaagaccttgtctttgagttctttcttctactacttgtttcttcttctttcttctacttattcagttctattgctgagactttccagagcattttgcatttctgtaagtgtgtccaatgtctctcgaatttttgattttttttaagctatctgtttctttgactatttctccctttatgtcttgtattatttgttggatttccttgcattgtgctttgcctttctctggtgcccccctgattagcttaataactaacctcctaaattctttttcaggtaaatcagggatttcttctcagtttggatccattgctggtgaactagtgtgattttgtgaggctggtaaagagccttattttgtcacattatcagagtgggttttctagttccttttctcatttgggtaggctctgtcagagggaaggtcttgagctgaaggctgttgttcagattcttttgtcccacagggtgttcccttgatatagtactctctcccttttggtgtggatacggcttcctgtgagccgaaccgcggtgattattgtctctcttctgggtctagccacccagtgagtctgcctggttcccggttggcactggcggttgtctgcagagagtcctgtgatgtgaacctcacagagatctctttgggtctctcagccatggataccagcacctgttccggtggaggtggtcggggggtgcaatggaccctgtgacggttcttagctttggtttaatgctctatttttgtactggttggcctcctgttggaaggtggcactttgcagagagcattagctgtggtagcatgaagaggaactagcagtgcacaggaccctaggactccctggattatatgccctttgtcttccactaccacagtgcgtagggaaggaccatcaggtgggggcagggctaggcatgtctgagctcagactctccttgggtgggtcttgctgcagagtatttggggtgtctcctaggtcctgcagtagcagtccacttccttcaaagggtctgtggctcctcttgggattgctggtttgttcttgaagtcgatccagagctaaagttcacatgcaagcctctgcacactgctctgttagtccgagtcagagctgcaatctagtcctgcctctcgtctgccatgatcccacctcttgggattggcttctttttttttttctttttttgacagagtctcactgtcacctaggctggagtgcagtggcatgatttcggctcactgcaactttcatctcctgggttcaagccctggtgttttcttgccactatttatatgatcatgtggttcttcctgtttcgttaacctgataaatagcattgattgattaattgtcagatcttaaatcaggcttgtattactggtgtaaacagtttataaagtataattattttttatgttcttagattcagtgtatttagtatgttatttagtgttcttttttgttgttgtttgctttttcacccaagctggagtgcagtggcgtgatctcagcttccggttgcaagtgtttctcctgcctcagcctcccaagtagctgggattacaggtgcccgtgaccacgcctagctaaattttgtatttttagtagagacggggtttcaccatgttggccaggctggtctcaaactcctgaccttgtgatccgccctccttggcctcccaaagtgctgggattacaggtgtgagtcaccgggcccggacttagtgttcttaacacagtttggtttataattttcctttctttggtttttatatcaggataatgctggattccaattctctagaagaatttgataaaacttctgcaaaatcatcttgtgacccatctttgttttttctatgggaaatttttgtgtcatgaattcatattcttaaattcaataatagaattattcagatttaggttttttattatgtcagtctttgcccatcatttttccagaaatttgccttttgcatcaaaatttttaatttattggaacggtgtttattatatattctttttaatgcctgtagtatctcttctgttattccctgttaattcatgataatgataattttcctctctttttttcttgattagtctttttgaagtttattgatttcatcagtttttttatataatgaggctttgggtttgttgatttttctccttcaaattagttttctatttaatcattttctccttttttctaatttccatttttctcagattttaatttaatatgctactcatttttctatctttgtaaggtatatttttagatcctttacttttaacctgtctttaaaaaaaagtttgaaggaataattttacttgtaaacagcattagttgcagtcctgaaattttaatattattaggttttcattttcttttatttgaaaagtttctaattttattgtaatttatttgaaacaggtgttatatagaaatatattgctgaattcctaacatttctagttacatttctaattacattgatttcatgttaaatccacttatgtcagaatatattctgtataatatctgtctcttgaagtttgatgatacttgctttatggcataataaagatgcacttgaaaagtgtgtttatgcagttattggctatagtattgtagcctttaggtcatcattaagtcaagtttattaatcatgttttcaaattttctctgtcgatttttatgtgcttgttatatcagttattaagataagtgggttaaaacttatcttttatttccacttttatatgccttttctaagatgtgtatttttaaggtagcatatagacggacttcagccttgaatttcataataaacattaacatggaaaaaatgtacaaaggaaaccatctgtcagtgagatatgctgaccacaaaggaagggagaggtgcaccacattgctctaatgccttacaccattcactcttcattggagttagctgggactcaggattaagcactaaccgaagtccaacacaggtaccagcgctggatgtcaaaagatcagattagcatatgagggatgaaaggagtgattaatgtatcccaagggaaggacaagtttagaaaagcttagagaatgtttgtttagatcttgtcatacacagaagacataccaacactccataaagttctgatttaaaggcattcactgggttggatgaggtaacaaaaaaaacagatgtaaagtagagatctccccaggtgggacctgggaaccagagttgacctctgaactccctgaggcaggtgagatgctacagtagcacataatttacatctgctgacttagtgctgatgctgtcagtatttgggcttaggagcttacatttaagtgtcttccatattgtcccttttgcttctattcatcctgtaattgaaggtaatgataatgatttgacagaattacatttttatttcttaatattcctgtcggtttgtataccctgttcataattttagtggctccagaagaaatcctgtattagccaggagcacaacctgttatgttagtcatttcattgagaagtaggttttatttttttttgagacagagtcttgctctgtcacccagtctggagtgcagtggcatgatctcggctcactgcaagcctcagcctcccaagtagctgggattgcaggcatgcaccaccacgcccagctaagtttttgtgtttttagtagagacggggtttcgccatgttgcccaggctggtgttgagctcaggcaatctgcctgccttgacctcccaaagtgttaggattataggcgtgagccaccgcaccctgccagttttttgtttgtttgttgtttgtttgttttttgttttagtctcatgtgttcccaaaataaataagtagaagaatttcttctgccaccctatcagtaaacaccttactgatcaaaaactagtgggcaatttttttctctctaaatcagaagaaaatcttgccatagtctctcaccaagaagtgaaccctgctttgtttattacacctaagatttgtcttctgcgaagtcagtaatcgtttaaagcaatctggatgatttgtacttatcacagcttagaacacaattcttcagtggcttacagcagaattaaaagctttccactttctgtgaggtgttagcaaccttaatgatcctgattttatgttttaataccataaacaaatcatgaaaataccatctactgattaagtgacctcatgattaaatacatatttcatcttgtacctaatagaaggttgacagagagagggagagttcaaatgaggaatagaatgagccagaaggatggatggcatttttatttgcagaaaataggaatacatttttactgctgtttatagaaaacatgttcgttggcacaagcttcacaaagactagcaggaacagaatcccacaaaatgaagtttaaagtaaatagtggatagatacctaaaaatttctccaggactcaaagcagtttggtggttaaatgccaaacaggcattgtagttaaaattatgcttgttaaaagaatatgttccattctgtaatgttcggatacaaaattaattctagaagagtctgccgggggaaattttatatttttcactaccattcaaatatagatattgaatatgaaatgtattcaaccttcattttgtgtcctgaggttttatatatttattaaaatgtggttcttctttttttcttaagtcattttgttttctgggtctagaactcatctttttgtaagacttttagatgtaaacaataattcttaaatcaatatgtgttgccatgttctattagcaaatattttaagactttttaaagatcagctcttctttttgagctgagaagtctgttatttcctaattagctgggagctgggattggtcacctcactgagagaccagatataaccacacacacacacacacacacacacacacacaataaccttaaaaactagagaattcagaaaacaaaaatataaaaaatacagatatatttcggtattaaatgctttaaaaatatgaatcgtgtgtaggatatagtatcttgcagtgattaagagaacaggtgtaaggtcagtatgactgaattttctgtctttgaggaagttactgaacctctctgagactcagtttcctcctgtgtaaatggagatgataatccctcctatttagatatgagagtgaagttagataatggatgcgaaatacatatgtactaaggtttggatataagcaaggcttatgacatgttgcctcttcttggtttttgggagggcagggcaattgtacctttctttggctgtcagctaggtacagaaaattgtgggtggcctagtaggccagatgctgggctggtgggtcaagatgcaggtggtggtgctgagaagacacacacagaactgcctgtgttcccgcagcaagcaaactgtgattgcgacccgcaagtgattatttatgctgtactttctggttgtctgttaaacctgcctgtgaaaatcagttgtaagtcttccttagaaacctctacaaagtgtgcatgtattcctccttatatttctttttgtttgtttgtttgttttgttttttgagatgtagtctcactttctcgtccaggctggagtgcagtggcaccatctcggatcactgcaacctccagctcccaggttcaggcagttgtcctccctcagcctctcgagtagctggggttacaaatatgcggcaccacacccggctattttttttttttctcagtagagatagggtttcaccacgttggccaggctggtctccaactcctgacctcaggtgatccacccgcctctgcctcccaaagtgctgggattacaggtgtgagccaccacaactggcctctccttatatttctatagcactctgtactttctgctgaagtcatgtacttttatgtaagacagtgaactttggaggcctcagagcatgtataacgtgaatctgcacgtcccccactgttctatccttctcaagaagcaagcgttgtggtttcagagtaggtagggactaacttgagttgcactcatatttcccgaagccatagaccgtgatatcacatgtttcctaataaagatgaatactgaaatgagcatcatccagtgtcttgggtttttatgcttcttgcttttgtttttatatttcaccttttagaccaaggtaatttccaaagataatgtcaccttgctgggtgaggtgatgggtaagtgaacattcacagacccgttagcacagtgccttgcacgtgctcatacatgtcatttgctattgttatcatgtgcctctgaaatagacgtttgaaatactctcctaatcgtggaaaatttaatgcatatccaagtgttaaagctaaaaaaaaaaccctgttagacattttgacttgttttcttgttatcaaacctcttcctcagtgctactaaatgtaagagaaatagaagacaaaaatttctgacaatataaaattcaatatattgtaataaaaagaaaaaagtctcaggtcttttaaaacatgtaaaatttaattacatttctcttatctattctttattgggcatgttaatgaactctaatttcttatgtaagtgtgtttaggggaaaaattagagaaaaattcagggattttatcctgaccaataaaaagctagccgtatgctggggacaagctaaaatgtagtggctgacaatgcatgctcctcagctctgtgactggtgctgtgtgttcttgatcaagttacttttttctccctgtgcctcagtgtctccatctgtaaaatggtgtagtaatactacttcatagggatattgtgagatttaagtgagttgatacatgtgtatttaatatacagccagatatacaatcagcattcagtaaatgttagcaaaggatagataccaagagagatgactccccacttccaaaggtgaagatttaaattatttcctttttttctgagcactgaatttgcaattagtcacttccttatcccgtgcatagctgaggcttctgggttccttgtctatgatgcctgcttgctcatttcccgcataacatcaactgactcatgatagtttgggattcaagtcctactctaaatctcagttttctcatccattaaatagggaaagtaataatgcctgactcatgaggctggtgagtgtttcaaaagaactaatgggggcctggtgtggtggctcacgctcataattccagcactttgggaggcagaggtgggcagatcacttgagatcgggagttcgagaccagcctggccaatatggtgaaacaccatctctactaaaaatacaaaaattaggcatggtgacatgcacctgtagtcccagctactcaggaaactgaggcaggagaatcacttgaacacgggagtgggaggctgcagtgagaggagatggcaccacttcactccagcctgggtgacagagcaagactccatctcaaaaaaaaaaaaaagaaaaaggaaaaaaaaacctaatggataagtttatatcatagtgtttggcacatggcaggcatgtaatagatatcatcaggaccacctatacttttgttattcctttgtatggaaaagcagtccctggtactacaataagtctttcagagaaaggagtgtaatcctaacaacaactcatgcaagtatttttgaaaagaatacttgataaggaaaacctgcatctacttctgctatttcagacattgctacaagtggttggtgtggtctctgtggctgtggccgtgattccttggatcgcaatacccttggttccccttggaatcattttcatttttcttcggcgatattttttggaaacgtcaagagatgtgaagcgcctggaatctacaagtgagtatggaaactcgggttggtatagacatgctagctagtttccatttatgccataaattacagagaccccctgaaattcggcagactctgtcttccagaatttctctaacattaggtaattgaacgtattggccattatgaatcattgtgtcccttagagcatgtggaattgatagcctgcaacgtgcaactttgcatttggaataaggaaggagtgaaggccatatggggagtaatattctacaggaatgtcagcactgtgaagacagggactctccgtgtcttgtttatgacatactttcttacacaaagccggcacttaattaaacatttttcttagaaataaaatatttgatcatggtgaaactaatatagaaggaaaataattagggtattttagtatctttccccgaagatactaaaaatgacaaggaaatgagaaggatggagaaaggaaaagaggtgtcagaagcaatgtatttggtaaatttatgacttttgcaaactcacaaaatggctaggaagttgcagttttaaacgttttgaaaagataagcattgttattttcagttttccatttgttaccagcggtgcttgttctaatgtcacagtttgaggtttttccccctcaggctgtttatatatatatggacactgaaaataatccccttagatcacaaggagatatatcagtttagaaaacatatagtctgttgctctcttcaatttcctagttttggaatcatgaggaagacattttatgattaatcactctattccacatgtaatcgcagagatgaaataatccagagttcatctcattatgcatgcacaaattaacatatttcatcattgttaaacacaaactcataaggagagtagaattgctttactttttaataaaaggtataaggataatagccaaaaaataaagaaggaagatatttgtatcagaaaagctgaatgccaactcagctctctggaagccacgcctagaagagaagcattgagtcccatcattttcagtatcttctactgagtggtaaatagaagtttattaggacaaagcagtttttggttgtgacatatatatgtttctcttttaacaatgaacatttatttatttatttatttattttgagatggagtcttgctgtcacccaggctggagtgcagtggcgcaatctcagcttactgcagcctccacctcctgggttcaagtgattctcatgcctcagcctcccaagtagctgggattacaagtgtgcaccaccacacctcactattttcatattattagtagagatggggtttcaccatgttggccaggctggtcttgaactcctgacctcaagtgacccacctgcctcagcctcccaaagtgctggaactacaggtgtgtactgctgcacctggccaacagtgaactctaagaggcatttatcctaagtgtctgcatgaagtagaaggggtgacagtccataaaagttgtagaaaaacttttcagtcatcaagaaaaccagctaagctaccatgaggtctagtcttgtaaggttttcagtgggcaggccgagcagtggagtccacatgtgagtaacacttggccaataggacttgctagggaaggtagagtataattgctgggagaccttccttgtgcagatgactggccctagccagtgttgtgtgtggacagcaaggctgtgcaggcattttatggtttgggcccgctcatgaaatgaagttattcgagagtcttgttttaagggagtctgtggtatgttgaaggaagcagccgttccagaaggaacatcttgacgtagactgtctgtgtcaacagccacatccgatccatgtggatgtggagaaaagggggacttaggaaggctttttgggaagcagtgtaggattttctctcttgaatttcagcatgtaccttaaagcttgaaaacattttcatgtggagattctgacaaccttatcatggcccctgaggcatatttgggtgttcctgtaccctgattggctgtaacaatgagttaaatatgcaggattctttctccatgcgctcagatcaccaaccacgggggctggttggttggaactatttactgttattcgtccagggtggtgggtctctgccataagtcacaattccactgtttcttctcagcagcagtggatcgtggtttttgagaccactgctggagtcaccagctgaaagcaggatgcctgactgccgtggcagggaggcataatccagcttcatccttgtgccctcaaggatttccaaagcctctgttggactgcctcactgcccctggagtcatagccggcatttaatgaatcttaataacaaatctgggccgggcgcattggctcacacctgtaatcctggcactttgggaggccgaggtgggtggatcacttgaggtcgagagttcgagaccagcctgaccaacatggagaaaccccatctctgctaaaaatacaaaattagctgggcgtgatggtgcatgcctgtaatcccagctacttgggaggctgagacatgagaatctcttgaacccaggaggtggaggttgcagtgagctgagattgtgccattgcacttggcaggctgaggcaggagaatcacttgaacccaggaggcagaggttgaggtgagccgagattgcaccattgcactccagcctgggcaacaagagtgaaactgaaaaaacaaaacaaaacaaaacaaaacaaaaaacaaaaacaaatctgcagttgatcattttatgtttgcaagagtcaccacatcaacagtcagtcatagagaagtacataaaaaccggaatggcatttggctgcatttctctagccacctccactcatttggcaatgcctgaaatgtgaagccgtatccaatttctgtttgtaaagatattgtgatccactagcaatgtctgccatgagtgtgaacccatgtgtcccatgttcgttcatcctagattcccagggactttgttcaatgcaaggtggttaataagcggcacaggaatagggaaggctgttggatattagctaagtaagattaggggatttttaaagcgtgggctacaaagtctggagaaaaatgccctcaggatgcatgagaacctttaactctgattattctctctctctgatactgtggctcagattaaaagcacagccttggaaataaaacagatatgagtccatgcccaagtctaccacttgcatggcttactttacttaaccttgggcagtgttttttttgttttcttgtttttgtttttttgagacatagtctcactctgttgcccaggctagagtgcagtggccgtgatcttgggtcactgcaacttccacctcccgagttcaagaaattctcctgtctcagcttcctgaatagctaggactgcaggcacccgccaccacacctggctaatttttgtatttttagtagagacagggattcaccatattgatcaggctggtctcgaactcctgacctcagatgatccacccgcctcagcctcccaaagtgctgggattacaggcgtgagccatcgcacccagctttgggcagtgttcttaatgcctcaagtctgtttttccctctgtcaaggatataatacttatgagggttgcctgagactgcttggaaaccttgaacatacgggaactaccagaggcactatagccttgagaattaaaaccgtaataaccctgagaggtcctacacagcgtcagtaccccgcagcaagactggtagaccagatctttgcatgcagttccttttcatgttcttttcagagaagacagaaaatctctgtagagtgtatcctaaagagttctctgtgttgtggaaaacacagctattgatcttgtcaaatggcaggttgtgtcagctggaaactgctgactagtacgttagagctgaggcttgacatacgctctccctcggtactagttagttgtctttgcagacctcccagctcaccctcactggcagccctctcagccctaagtggggtgtgaaagagaaaggactatcttttcaaaggttacaaattcctgctataccttggtaatttggtgtgaattaaagtgtgtagcttgatcttcatgatattcccgggtgttccaaaactgggatggtacctaatttctcaagttgaccctgccctgaaacccagttggagataaaacagtggcgacttggatctcctgatgaggaaagcaaatgacaatagctatgttgaagaatttcattccaggactctgtccccatgactgccacatctccttccttctcagtggcattctctatatgatggacgcgttcagtcacaacactcccttgctctggaggtaagagcatggttctagtgatttctctgaactactgggagccaaactctttgtagggtaatggggcctggaattctcttgtgttattcctaatatcaccctgtttccagattgaccaagttccagggtgcaggctagaacatctggggcgtgcagaaaagacctgtgcagaacatccagcctttctcacagaagcaccagctcagtcctcttacggtcatgtcacctgccaccttcccagtgcaaagttacaggttatagagagctgacacaaataacgagtaaaaggttactctgtgtgttgaagagtcatctttttgttttcttgcttttgtttttgtttttttgagacatagtctcgctctgtcacccaggctggagtgcagtggccgtaatcttggcttactgcaacttccacctcccgagttcaagcaattctcccgtctcagcttcctgagtagttgggactacaggcgcccgccaccacacctggctaatttttgtatttttagtagagacattgtggatgccagagatagagaatagagagaaccctgtggactcgtgggaggctctctgcctgaattagacataagggaagtgccagatcacattctggtggagaatctatgctcagggaaggtctggtttcttaaagcactatcacaggagagggcccctaaaagttagtgcccccagtcagatgtatcagtcaggaaagagccccaaggatgggtggacagtcagtaacctgcagctccatctgcctttccccaacccagggcttcccactttctcagaaccccagtgtctcatacctggcggcctcctccttcacttacggaactgtggactctggactctgatatatgtggaacctccatgtcttggcacactggtaccccagcacccccaaatgtgcagtgtctgtgtgtacagtgggcacaccagtattgagtcagctgtagcacagatcggcatggggatgctgtactaagagtccgacccagaaaatgagttagaatttttctcttaaattttccactccctccgccccttacccccaccctaccccctcatcattttataaaacatatgtagccatcgcctgtaagatagattggccacgcacggtggctcacacctgtaatcctagcactttgggtggctgaggcagcctgattgctggagcccaggagttcgagaccagcctgagcaatgtgacgaaacccagtgtctacaaaaatatataaaaattagctgagtgtggtggcacacctgtagttccagctactcaggaggctgaggtgggaggatcacttgagcctgggaggttgaggctgcagtgagccaagatcatgccattgcactcaagcctgggtgacagagtgagaccctgtctcagaaaaaaataaataaataaaaagttatcttaacttctcccggacaccccatgttttactaacagggtcttctctggagctacacaggtagcaaagtcagtgtttgctaattgcaaagcacaaatcatttatctcagaaaagaatgctaaagacattgtgctaggtcacgtgtccccaatatgcacctgccccagtatggcctcattcatggtagacaattgaaactctcaggaattcctccctgcccaaaagtagctagccctcatgtccgctgctatgcaggagggaggtatgtcctggtagtcatcaaatggtgtgcttgaaacacagtggcctgctggaaatggtggctcacacctgcctgtaatcccagcactttgggaggccaaggcaggaggaggaccctcatctctatgaaaaactcaaaaattatccaggcacggtggtgtgcatgtctagtcccagctacttgggagcctgaggtgggaggatcccttgagccttggaattcaaggtggcagtgagctatgatcacaccactgcacccagcctcggtgacagagtgaaatcctgtttctaaaaaacccaacaggccaggtgcggtggctcacacttgtaatcccagcactttgggaggccgaggtgggcagatcacctgaagtcaggagttcaagaccagcctggccaagatggcaaaaccatgtctctactaaaaattcaaaaattagccggccgtggtggtggacatctgtaatcccagctacttagggggctgaggcaggagaatcgcttgaacgggggcaggtcggggcagggcggcaactccctcttaaaaaaaaaaaaaaaaacctacaccacacaaacaaaaacacaatggctcaaggaggagcagctggtcagggaacctcatgggatatacagctcccaaagaaaaaagaagtcacacaaaaaagaattcacttcttaaaattctgtagagatgaagaacccactgagaccacagtcagattctgaaaaaagcaatggcacatgccatagagacctccagagatcaggacaagtttgcagtggggcagtcataaaaacatctgtccggttcctggagccaatgttaagaccattcagagacatcttggctgggcaggttccttgggcacggcacaagggcattgcagcacccaggtccatggagatcacaaaggattcttccagcatgagtgggcacagaagattccccaggatgcagggaagtgacagtctgtctgttcagctcacttactgagtacatgtcctgtgccaggtaccatccagttaccagggtgcaatggctatagctgacccttgagaaattagcaatttaaggtggggacagacacatagatggctaattgtaattcagtatggtgagtactcttaacagagaattgttttttaaaatcctactggctcaaaaatcagaaaaatatcatttctgcccaaagagatgtcagggaagaatatggagaggaggaagacctggaaggctgagttaggaaggaaagaattataactagatttgaatgtggtcaaaaataggacgtttatttccaggccccttatgtgaggtgtggtttgagcaggagcttgagattccagtggcagggtcccctcaggctattgggaacatttatttttccttgaaacatgaagcctcctaggaggcctgcgtgtgctgtttggtggatacgtgaccatggagcttgggaggccgcaggtttttctgcacccagcctcactgagctgttttctctgtctgtttccccagctcggagtccagtgttttcccacttatcatcttctctccaggggctctggaccatccgggcatacaaagcagaagagaggtgtcaggaactgtttgatgcacaccaggatttacattcaggtctgtctatttctggaaatggtttcaaaggacaggatctgctgctttttctggcttaacctccctggtcagatgagcttgttggcaggcacctcagggcccagccccacatcctgctttttttgcgcatcttcgtctccttccccatccccttcttctgggcttggactcctctcggaatcgctgctgcacgttccctctttgtgccccctgactggcttgtggggtctttctctcaccatgcatggcctgtggctctgtcagcaaacgttttctgcaaaaggccacctagtaagtgttttaggcattgtgtgccattattgtctctgttgtgatgaatcacctttgccattgtagcacaaaagcagatgtcaatacattggcaaatggctgtgactatgtttcaataaaactttatttacaaaaataggtgctggctcacgtgctgtagtttgctgaccccttgcatcagtgaagattttttcaatatggaaatttcagaatttccaccaaatctacaaaattcagatccgtcattccaatctttattttatcttgctgattaaatggcactttaaaaaccacatgctaaaaggaaaaaagaagtagcaaacaaacaaacaaaaaaccacatgcaaatcctgttagtgaggtcatttttatatagcccctaagcaatagtcagtgtgtgtgggccttctggtaagtatggaaggtgggagaagtaaaatgggagctgcactctgctgttggagaactggaccagtcaaccatgtgtgtgggtggacttcacatgagatgcacttcacataagtatttctcagcactgtacgagatgtccttatgagactacttttctcagttctttattaggatcatatttctgggtttcatattcgcatgcatcctcacagaaagccacggtaccattgtgtatgtgtatcgtatattgcctgtatcacttagctttctggaatctaaaggttccttgggtgtgcaactttggtgccctactccacgtaaaaatcttctgtagctcaactgagcaaaacacactcgcacattcatctacttattcatcatgcttattaccgttctcaaattcagaggcttggttcttgtttttgacaacgtcccgctggtttgccgtccgtctggatgccatctgtgccatgtttgtcatcatcgttgcctttgggtccctgattctggcaaaaagtaagtacagatgtgaataactatgtatggtatgattacaatttatagctgtgtttacatttattaaactcttgccaccttgtctactactacatactgtttggtcctaatgaagtgtattaaatcatttacgatgtgtcaggttgggtaggattcagcagtgtgactcatttaaggagtcatttgggtcttgatgggtttatctttctttgaatgggttgagatatgcgcagttgagattctgaacattcctgttagtgtctggtagttgtgaagagaaaaccaatttattctgaagcattttgtccaacttagggtgttagccttccaactacttgaatctattgtttgtagttgcctggtgcatgaggttgagaaaaattctcagcaggagagtattatcttcaatgccacatgggtaccagacaagcagggcatgagttcaccaccccagtaacaacagtgcattacaatacttaataatggaacaaggagagtagtattttagtctcaaaagcattggcacttacaacctattgctttgtttttagtggtttccagctgtggttgcattgcacgtagaaagtggaataatgtaatgagctttgaaaccataataatgaatgtctgaataatgacattatttcttgcgtttgtaatactgttaattaaatctatgtcgatcctgttggaattcataaaatcatctaaaaatttttctaaatatacagtgttgttttccccattgtatcttgatctcaagcaacaaatggtaaaagtatagctattaatgtcattaaatgtgaattgtttcaacattatgaagggttcctcttggtaagtggcagaaggagccaggcttaggtttgaagtgagactgactttattcccttcttcctccttacgtagctctggatgccgggcaggttggtttggcactgtcctatgccctcacgctcatggggatgtttcagtggtgtgttcgacaaagtgctgaagttgagaatatggtaatatttaccttcacgttctttgccttttcaatctccttgccattaaatggtataaaagccattcttatgtgaaatattaaaactgttatttttacatctttggtaacagattttttttaagatccttcctccatctgtttaaagttaatgtaaaataaaatatatacatctttttctgagtcttatggttgctctgtcagcaggttttatattcatcacaagctttttcagatgtaataaatgtctctgtaggagggaggttctgaaattctagagaggatataagctaatttcttagaagcctgtttaattttgtttcttaacgggtaattcctcattcctgttaaaagaagacttcagtattttgaggttgtttacatttaattaataggtctcctcctctcccagttctagcgtttactctcttatgtgaagaacagaagggaggaaggccttaactttgctggtgtgccttcttggtacagaaagcctcctcttggaatgtgctagtcaaagggtattagtttatggtggtataggaggctttaatcaatgttttaaatatttgcaccttcccctaaagagagaaaagcaataaacataaaaatcttttcattcttctcatagagcaaaagttgagtaattattacagtgaggtttcacgatcatccagtttaactgacctatatcaggtgatccttctatagcaaaagattcttttttggggggtaggggtgaggggacagagttttgctcttgtaccccaggctggagtgcaatagtgcgatcttggctcactgcaacctccgcctcccgggttcaagcgattttcctgcctcagcctcctgagtagctgggattacaggcatgcagcaccacgcccagctaatttttgtatttttagtagaaatggggtttcaccatgttgaccaggctggtgtcaaacacctgaccttaggtgatccacctgccccggcctcccaaagtgctgggattataggcatgagccaccgcgcccagccagcaaaagattcttgattggtggctctaagtattcctttcctttacaaaattttcttgcctttaatacaggtgtgagaagtggataaataaaatctaagcattcatttctctcattcttttaacctaatgttgaaggaagtggttgtaagtgaaggtgttacacaatgatgaaccaaatttgtaagtcatcaacatcctcgtctgtctcctgcttctctccttaaccaactatgtatgaaagaagaacatttcattgacagtctcttaacatccataaatgacaccctccattcctaacccctcgggatgtcatatttctttcagatgatctcagtagaaagggtcattgaatacacagaccttgaaaaagaagcaccttgggaatatcagaaacgcccaccaccagcctggccccatgaaggagtgataatctttgacaatgtgaacttcatgtacagtccaggtgggcctctggtactgaagcatctgacagcactcattaaatcacaagaaaaggtttgtttaaagcatcttgcctcttctcaatttcagaagatttagtgctatgtctgcttgttgtcttccttgtggatgtgtgaaggggatcagtgatacgtaggttaacctgtcttggaaactaaccatggaatgtggataccaacattcttcctgctgtgaactgctttactgtggttggtgggccccgggcctcagggctggagcttaacgtgacccaggatactctgtttgatacctaattactcatggatttttccaggaagtcaactctggctttgtgtcaccaacactcctatgtctaattctgtcgatttttactttgttgcatttctcaagtccttctcttcccctccactgctgcagcttctgttccagcctttctcctcctccatcctttggtcctgtattagtctgttttcacactgctgataaaggtatacccaagactaggcaatttacagaagaaagagaggtttaatggacttaaagttccacatggatggggaggcctcagactcatgatggcaggcaaggaggagcaagtcacatcttatatggatggcagcaggcaaagagagtttgtgcagggaaacttccccttataaaaccatcagatctcatgatacttattcactatcatgagaacaccacaggaaagacctgcccccatgattcaattacctcccaccgggtccctcccacaacatgtgggaatttaagatgagatttgggtggggacacagccaaacattatcaggccctttccttagtctttcttgccttcctttaacctgtgctttgctttccctccccatccctttcactgcaaactctttctttctgaaacagtttgatcacagatctgatccttacgtggccagctccttgcctgggtgagcagctgctgcaaccttaatgagccccaggcccaccctgacaggacctgtctggctctcagcccccaagggaagacccagatcccatgaccccatcagtgctcagaaatcagacccccaagctggaggcagtaaaggcaccagagactcactcaaagtcagtgaaaggaaaacaaggagggacttgggaggctgtgtggagttttgtgagctggttttgcaggtatctaagtctgccagcaatgtccctttcacatgtgtcctggggcccttggctaggactaggacagcctcttgaaggaactaaaccagaacaaacaagacagtagaatctcttccccttcccacccctctcctcacaactcccaatatggacacacatcccctgcactcagggtgccctccttctccccaagcacctgtctgccttgctcttagtgtgcacccttttcagtcagttcaagcatctctgcctctttgaaactatattctccacatcatcttatagattcttttttcgagacagagtcttgctctgtcgcccaggctggagtgcaatgtcacattcccggcacactgcaacctccacctcccaggttcaagcgattttcctgcttcaacctcccccgtagctgggattataggtgtgcaccaccatacccaactcatttttgaatttttagtagagaccaggttttgccatgttggccatggctggtctcgaactcctgagctaaagtgatccgcccaccttaacctcccaaatcatgcctgggattacaggcatgagccaccatgcctggccagattctttaatgtaacatctgtggcccacccgtgttcataacagcattatttgcagtgagcagtaggtggaagcagcccaagtgtccattgactgaggaatggaaaaacaaaatgtgatacgcacgcataatggaatattatccagacttaaaaagaaggtgattctgacacatgctgacatgtgtgattctgacatggatgagccctgaggacattatgctgagtgaattaggccagacacctaaggacggtgctataaggttccacttacatgtgggtacctggagtagttagtcatggagacagaaagtaggatggtgggcggcaggggtaggggaatgggcattagtgtttaatgggtacagagtttcagttttacaagataaatggagttttagagatggatgatggtgacggttgcccaacaacatgaatgtatttaatataattgaactgaacattttcaagtgattacaatgatcaattttatgttactttaccacaatttgaaaagtacataaagtaccttttgtgtattttaccacaatttttttttaaagaagatagcacgatggcatgatttataattctgggtcagcatctcacagtaccctgagcctcttaaagtcagggagcattttatattcgtctctgtacccccagaaaatggcatgctgcagggcacatggtgggtgcctgtgagagtgagggatatgcacatacaaagaaatcggtaacaaaacacacacgacagctcccgcaacagcccgttctctgggtgtcagtgttagatactttcggaactgctcttttcagctcttcccaccacagacccatttaatgggctatagtcacaattgaatgaatgatacccttgtgccatgaaaaataaatatacagcttcatgcccagaagatacccagggaaccagcaaaagctgattcctcattatctacccagcatccttgtgagtgtgaagaaggtggagaccactctgcaggcagcatcagctgtagctcttgctgaaagcaaggtttctcagattctgttcctgatggggccagggggatgtttgcttactctcagacaatgtgttattaggtcctacctgatcaacatcattctgttagtttggccacgttgtaaatttctcttgtagccataaaatatgaattatctacaaacctctgttgtacacattagaaaacaacctatatccccacattgatatcgttccatcttaaaacccccccaaatcataggattacctgagatctgaaatgtgggagggtaaattgaatttgaagactgaattatagctacaaccacttggcttttgagacagagtctcgctgtgtcatctaggctggagtgcagtggcgcaatcttggctcattctgcctctcaggttcaagcgattctcctgcctcagcctcccgagtagctgcaattacaggcacccgctgccatgcctggctaatttttgtatatttagtggatccggggtttcaccatgttggtcaggctggtcttgaaccccgacctcaagcaatccacctgcctcgacctcccaaagtgctgggattacaggcatgagccactgcgctgagccccacttggcttttgatttgtgtcctggttcactcacagtgtcacctttagcttcatttgtgtattcaggcaacatcgtggtgagttggttccactttttgtgtgtatattcagggttcgtctcctccacacctgcctgcagccccaggatctcaggcagtccctttgctgttggagctgatggagaggggcattgtttccagtggagatgtaggaatgtgtccacacagcagaaacagggcttcattctctttcaattgcttcatctgctcagatttcctggacattataacaaataggaaaaagtaataggcgctaagtaggtttctaattcacagaagaaatagcaagtaaaaaagaatgaaccaaaatgaggtatataccaccctagccttcctggttagattccaaacactggctgcatttttcatttagatggttttgtggttgatttaatcattttagagagtactgggccattttaaagcatttttcagctctagaggtagattgattttggtttgttatttttttttccttgctcaaagctattacttggataatacctttttacagatgtgtactagaccttgctatagtgtgcaaaaatattagtttcttatattctctccttttttacattaatgtttgctgagaaacccctcctctcacagccagattgtcccacttgccctgcctgcttgctcatctcaggggctgggatcagcatcacctgcctctgcttggaaacatgttagaaatgcagactgtcaggcccaccccacccttttgattaaaattgcactgggacaagaaccacccccactcctgcccctgcattaaagccgttgctctccggtaagcaattttggatgactaataatctgtgatttccaagaaacttcctttgacaacttgaagtggagctcgtggattgccccagcccctcttgtgactaaacatgagactctggatagtcctgggccaagtgccaccctacaggttttttgtttttttacttttatattctgcaaattatgaatttacattacaatttaattctgtgtgattccccatttatgcattcatttgcacctttccggtcatctctgtcttctatcacagttttcatcccaccatacagccttccatgaatagcagtctctgtcctcataccagctcagcacagcgatgtatttgagttccgttcactactgatgggatcaaaatgggtctcactgccccacagtacactaggtctgtctggcctgtttcccagttgccccatgtccaacgtagctgcaggcttctctcccagcctcttctgtgggtgccagttcttcctgtcaacagctgtaatccaccctaatacaggtactgtcttggctcacagtagtcagcttcttgtcctagccaccttcttatactcacgcatgtccacagcatgcattaaatgtatgacaataggaccagtatggcaggccagtgcctttaaagacaaccacacttctccccgctgtctcccttctagctacaccaagggaatacagagccaggctatccaagtgattgggaggccatcggcagaatgggcaagaggcaggcagacttgggtttccgtcccattccatcacttaggggctcagtcatttcaacagtttaatcaatcttactaagcctcgatttttctcttttgcaaaatgcaagtgatagggcctagccattagagttttataacttaaacaagataagaggtgtaaaacacctagcttattgtatacctgaacaatatggcaatagatttcccataaatgtttcaagcctgagttaaatgcttaactctctgggggatttctggttttttttgcaggacaccacaggtgatacaaataatacaaagctaattccaatataggccctgcccacagcacctgtcgcctagtagaagaaacaaagtagtatataaatgcctgctccgtaagatagaaggaattcgcagattttatggctgtttagaaaagatgttacgacagccattaagtgtgggagaaatccacacgaggggacaagtggaggattttaaggcaattacacatttgaaacagactttagaaggtggttaggatttcagcaggtcgaaatgcatgtgaaaggcacgatggcatatgccaaggctcgatgccgtgatttgatatgaagaattaggcatctctgagcatacaagggcatgaactaccaggtgaataacacacatgtgcacacttagtcctcacagccaccccgcaaactcaatcctgctcatggagctaaggatggaaaggttagttgggactgttttgtagaggaggtttcccagtgtggagtgccaggcagagagctgtacttcggaagtttaatctgagaaatgagtgcacggggaagacgctgaaggcctgaagccaattgattttatgtactgctggcaagatgtgatggggcaagtgattccactttgtagaatcaaactaatgttgattaaaacaaagttataataccctggttagtgaatttgcagggatacaggtgggagtagaaattggtatcatatttctggagggtagtttggcatcacttaacagcctcctttgaaaatgttcatacctgttcctcagcaattccacatctaagaatttattttaagaaaccaattaagattgcttgcaaagatgtagcttcaaggatatttaacatggtattatttacaatagcaaaatattggagcctaaacatccacaaataggggatttgttgaataaataatcatatatactgtaatattatgtagctactgaagtaaatacttttattaaataatagattataatattctgtgcatattctcattttgcctaaatatatgagattatatctttaggaacacagataactcacactcaagttcagaaagaaaaggtattaacatgtgacaaggattctgtcagattgctggggttgtggccagcatttatttatttttcgaattcacttgcactgattataactagcaaaagagtttttgtttttcaaatgttaatgcagccttgcactgaggtaatggctgcagaaattaaagtgagggtattgagtcaagaaacagaacaagtaatatttttagtgcttggagttgagaaaacctgggagatgggtgttttgagcctgtgaacttggggaagaatttattagattaaaatggaggagttagaagcagcagctgtttggaggggggctgttgggtattaatcatgttgagtttcatatatgaagagagatccaagtacaaatgtctaatgtttggccaaagagaccactcttggcccagttggggaaacaaaaagggtcaattgtaaagcaattaaaataaaactaagtgtctctttcgtgttatgaatgtaaacttactgatattagtgatattctccagaggatttggtgaaacccattggtgacttatgaaagacttggagactgtaattttgatgactttgaagagaactaaccagagccaggttttctttggttgccttttgctgattatatcctcacctgagtttggagtgcctagtcttatggttgtaggcagccctcagtgttccctacctttgagggggtccatcctggccatctactaataatggcctacaaatgtccaggtttgcacagatggatcagtttcccatagagctgataacatgagtgtccacacattctcaaaaacacagcatttgtctatgtctagatacgtgctgatttactgagaaacacacataagccccacacacacacacacacacatacacacatacacgtgtgtgtgtgtgtatgtgtgtgagagagacaaaatatagtcaggtatttaatatttggaagtttctctaccaaagaatgtgtcatcttaaatgatagaagtctggaaaaatgaatacctgtttatgtcacttgtgacacctctgtcttgaattaatatccctgtgaaattatctcagaaattcaattggtgtgtgtgtgtgtatatatatatatatatatatatatatatatatatatacacacacacacacacccggatgtacctatgtgcagaaaatggcccacctataaagtataaactaggatttaccataaggtagaatatgactccaaagttaataaaattagctaaagccactttttaaacatttacatttttatattttgtacatgtatctctttaaagataaaattccttgtggaaatgccattattgactttacagatatggaggtgttcaaatgaggtaatatgtcacatttccaacacatacccagtgcccagtaaagttttgcagtgagttttaaaatttattaaataatggacaaatgattgaaggcatgttttatgtccttcgttgactccagatttctaaataaggaggatgtcatttcttgggaagttcccaccaggaaatttgcagttgtgcaaggtcattggtgcagaggccagtttctgcatacagatttatatgcacacatgtgaaagccagtttttacaatatagacgtattgcccccacctttttaccagcattttattgattctttgatcgtattggcagtgcacttcatttctctctgtcttggctttaatagaggagtgatacttgacacaaatgtttctcaaggggcaattgtaagtattaattagtttgcagcatgccttttgaactgtgcagatgaaaggccttacgtaaatagcaaatgttacttgcgttgttgttgatctcattatgtgttttttggctactggttactactgtcttttaagacattgcaatcttcacttcagaattttgaaacattttgagacaaaatataggcagatatttaatatttggaagtttctctaccaaagaatatgttatcttaaataatagaactctagaaaaatgaatactcgtttatgtcacttctgacacctctgtcttgaattaatatccctgtgaaattatctcagaaattcagattactcagatcctgcaagcaaagctaatttaaaagttgccttttcatgggccacttaggagactgttgacttttcaatgccagtaaacagattctgttattttcaactcttttttagaacagtggatctcaaccaggggcagttttgccccagaggacgtttgtcagtgacatttttggtggtatcattttgggagtgtgctcctggtatctatgcagtagggtccagggatgctagcgaacctcccacaatgcctggggcagcttccaaaatgaagaagtatccagctcagaaggtcatcagtgctgaggttgggaaactcttagactacactcaatatagaatgtccttaattcttcttcaaaaaccgaaagttttctcctagttttgctgcatcctgtgatttttttctttttttttttaatcctgccgcctggatctctctgtaggttggcattgtgggaagaaccggagctggaaaaagttccctcatctcagccctttttagattgtcagaacccgaaggtaaaatttggattgataagatcttgacaactgaaattggacttcacgatttaaggaagaagatgtcaatcatacctcaggtatgcaagtcatagcgtccttacctgccccttttataagagctactatgtttaattgcttttactcttattgctttttttaattggatgaaaggattgttttttttttcacccaatagagcatgtttttatgagcagatattttcaacaggtattttcatcagatatccagctttgttcatttctctctctctctgtgtgtgtgtgtgtgtgtgtgatatttaataacttacgcagatagatttctgtactaagatgccacagttttatccactgataaccataaagaacaaaatgatgcattgtttgtttagcactggggaggtttctatggggagatgtggattttaagtgtcttaatgttggaattttgctgtaggaactaaagctaccttctcaaaggtgattacctccatgaagggctttctgtgaaactgtgggctgtgagagttaaaaaacttatagttggctttgtggtgacttttagaatctagctcttggtgaatgattttaaccaggaggttgttaaagaatagcaaggaagaacatgagagacggaattccatctctctgcacttctgcttcatcttccttacgatcaccattgtgagagtgtgtggtgtatttcacacagacccagtgagtgtttgctctgatggtggagggttaaattggccatcctttcccggactctgattctattttcttttcttctcctttgcagaagtgactctcaaggagtgttctagagattggattatttgtacaataagagctcctgtcattgctttggttcatatttaacataaattcagaaagtattcattgagtaattactattctccaggtgtatagtcatgagcaacatagaccttgtccccaccggcatggggtctgcagctgtggggcctcatggcttccatcggacctcacagttccatcctgtccttcactttaacacctccacatattcaactccagacatggctgggttttttgtttgttttcttttaatgtgggttttttttttttttaacactctatagtcattgaggggagctgaggaacacacacacacacacacacacacacacacacacacacacacaaacacatattctggagaagagaaacacagagaggagacaagagcaaaacccaggcagtaatgagctttctgggcatgtggatataaacaactcttcaatgcctgtttagtaggaagcatagagaacgtgccaccggaagggaaggagaatgtgatttttatcttagaccaagtacagttatggctatcctagcactgacctctaaaacaattggaatcacgcttaagtaatttggaggatgtgaagaaattggaaccctgtgcactgttggtgggaatgtaaaatggtgcagccactttggaaaacactgtagagattcctcaaaaaatgagagctaatgtgatccagcagttccacttccagaaagaattaaaagcaggatctcagagttttgtacatccatgatcatcacagtacccaaaaggtggaaatagctcgtgtccatcgccagatgagcagatgaataaaacgtggtctatccatacaatgggaaattattcagctttaaaatggaaggaaatcctgacagtctataatgcagatataccctaaagacattatgctaagtgaaataagccagtcacaaaaggacagacactagatggttcccctaatatgagatacctagactagtcaaattcacagagacacaaaggagaagcgtcgtcaccaggggctgagggaaggtggggggttgggagttacattatttcacataggacttcagttttgtcagatgaaaagcgtcttgtgaatggatggtggtgatggctgcaaaacagtgtgaatgtccttaagaccactgaaatgttgactttgaaatggcaaaagcagtaaattttatgctatgtgtattgtaccacaatttttatttttagtttaaagaaaaaaaagtatccctttcaggataaaatgggaagaaatgtttagcacgttagattccctctggctattagaagcatgacttagtgcttacagtagaaaatgagagtataaattctcaagttttatattttggttatgcccatctcaaaaatgggccaaatgaggtttacttagcagagataatgggcatgtctgtaaagtgcttttatatccttggatgaaaggttctaggaacgtgccctgcattactttgaatgaattcttaataagaaatagttgtgtgcttgtgtacataaaagaactctaaataaagaagtaacattagatgattcttggctctgccagtaatgttttggaagcacatctgagcaaagactaaatataccttgacatcaccaggttttggttcagttccataagtttccaccctacttttgagcaaatgctctatgtatgtagtccagggagcatgcttacaaaacactgctaagctttgtatccatgtagatcctgatctccaagcattgtaaacagagagactttcctttttaactttgtatggctttgtctccaaggctcaatgttggttgaaaaaaagaaacatagtctagagggactgtgcaatacttaatgcgacccaggaaatcattcagcagactgcctgggatagaatctttcagagcatcttctaagcgtcaacacgacccacatttttattccagcactgcctgatagaagtgtgacctcaatgaagtcacttagcctccaagcttcagtttcctcatccttaaaccaaacctagtaattactaacttacagatttgttgtgaagattttactagatgagaacatgtttgtggccctactctgggttctgaggaatgctcaatagtaactatttctaattaaggattggggtgcaggcctttagggcattattgctactcgctattctagaaggacttggctcattaacttctgtttctatttttgtgatccttggtgaattcctttaaccaaattgtttatgtaaatttaaatagtgaagcagcaacaaacaaaaaaaaatgtgcacaataaaagcctaagagagaaatctaatgtttttctcacaaggaacaaaaggtgaggctatcactttgttttctggctttcccccaccccggtcttagcggcattcctcaccactctcagtacccctctaatgctttgcatttcgcgagcaggcagccgacactggttctcagccctgcgtgagaacaggggcttgtccctcttagatccagtgctttagtgattgttgcgtcccagacaagttacacaagtagtgagaattcctaacatttgcagaatccttaacatggttatcttctttccttgccatctcccacttcgtcctcacagcaattctgtgtcatcctcatttgacacattttcaaactgaggcacagagagcttaacccacttaacaagtaaacagcagagtcaggattcaaatggaatttacggcgaatctcaatgccagatcctgagttcctgaaccctctcctagggactttaaacccatgttggctggcgcagtccccgatcagaactctgctttgcaacatgatttagtgtgggcttgtgcaggtgcgcacacacgcacagaaacaaaagtctcacaacacgatattactccatgcttctgcgccctgatattttctattatatccattctattctggttcatataaaagacataaggatggtcatgagtcacaaaagtgatttcatgatccattggttgcacctgccatttgaagaacagcgtgcctcactgtgctgccctgcttggccgggctcctgctgcctggcagcaccgtgcaaggagccttatgacacagtgattgtcactgcagccctgcagggtgtgtcaagttagccccattctccaggaaggaaactaaggctcagggagattaataacttacctggagatgaacagctaataagtagtagaatcagaactcagaactatccagctcaattttttttcagtaagtatttgttggacagcatgatatctcatcagacattttactcattgtttttcttttctttttctttttcttttctttttttttttttttttttttttttgagatggagtcttgctctgttgccaggctggactgcagtgacgccatctcagctcactgcaatatctgcctcctgggttcaagcgattctcctgcctctgcctcccgagtagctgggattacaggtgcgtgccaccacacccagctaatctttgtatttttagtagagacagagtttcaccatgttggccaggatggtctcgatctcctgaccttgtgatccgcctgcctcagcctcccaaagtactgtttgtttttctgtctacccaacttacaaaaggttcccagaagccataaccaaagagagcaaatatacagcaaagtcaaaaggtatcttttctttgaactttatctgtcatttggacagttaggtcattttgaaagactgaatcatttgtgatttatttttatttttatttttattttttccaaaaccttaagtgacactaagcactaaaagaaaatcattttggaaacagagtgtattcacttatgtgtcgtgggctagtgagcgtcagaagatcctccaagccttaccttgtgggagctcagagccctttttcttccgaggcctcgctggctgcagagggtggagaaggctggagacttgaggttgcatgaaggttactggtctgcagtgcagaaagcatacacccctcttcctcagaagtgagtggaaagccaaatggcttgtgtcaccacacactgatgtagggaatctaggaagtttgggagcaaacacagcaaaagcagaaccaagtgctgtttcttcgaatggccatgtttgggcaagtctagcctgcatggcttcctggggttgtgtggagcacgagtttctgtgttctctctcttcctggcttatccctttcatttatggttcagggtcctctgtcactcttgaccacaccattagcaactcaaattcgtggttaggattaagcagcaaggacctgggaaagaactggggcacagaaatgatgacatacatagtcaggggccagtcctggagtcactttaagaaacaaatactgggccgggcacggtggctcacgcctgtaatcccagcactttgggaggccaaggagggtggatcacgaggtcaagagatcaagaccattatggccaacatggtaaaaccccgtctctactaaaaatacaaaaattagccggacgtggtggtgcgcatctgtagtcccagctgctcgggaggccgaagcaggagaattgcttgaaccccagaggcagaggttgccatgagctgagattgtgccactgcactccagcctggcgacagagggagactctgtctcaaaaaaaaaaaatactgaattcttaagaaagtacccctcaatttgtattcaaaatttcaggaagaagcgaacagtgaaagtacttcctaaataatttccctaaacagaatagttagctgaaatgtatgcttcttttgtgttcatgacacagggtagttaagtgcacttcccaaggagaacaccaaggtgatactataactcagacaagagtttgcttaactgaaggatctggaaaaatggatttcaaaactttttttaggatggattatttactcctccaatcctactggcacaaataaatgttttcaactaaagagtaacttcatgcaaattcaacatttatgatagcaccctaacggttggcatacatcaacagctataatctttgttaggattaaacagattcatttttcatatttgatggacttttttgtttttctatcaaagcaaaagctaagtagtttttaagcagcccactgctcagacttctgctatcttggtatttctactccctgaattttcttcagtaagttgaaaaggttaaccagagtgtgtctctttaagacttctttttttattacctgattttctttcctttttttttttttttcttctttttgagaacaaaattcaaagggaaaagaggtaggtatgcagttactagtaaagaaatacaattggattctggcctaatgcagtcagtcctttgtttctgcacactgaagtcttcattaaggccatggaactgctccctggagctggtgacctttttgtatctaaagaagactttacacgacttaaattctttttcctttgttggtgaacaatgttcttttcttctgaaaatggatgatgatcagttcattcagaggctacagggtttttttaaaaaagaagggaaaccaagatttaaagtgacttcaggtgattccctgattcttgacacagggagatgagctgccctgaatcaaggtcttcaggatttgaaatgcacacatagctctgaggacatcaggcagcagcagttgtggctagctactgtgcagtgtatattttaagagagcgaagtttcctggtttgggacaagattagggtaaagtattgtgctttgtcctgctggtttgtaactccccatgcgatttttgtcttggtcccaggtcgttttaagtgtctgaaggttggtggatagagtttcttcttgagataatgagaggcttgtcttccagaagtttatatgaaagctctaggaagactgtaattttcagtcttgcagtcctgctgagggattatcaatttactgcactaaatgctttgattcagagcggccatttttaggtcacgtggtgggttttttttttgctgttgttgctgttgttttgagacagtcttgctctgtctcccaggctgcagtgcagtggtgctatcttggctcacttcaacctccacctcctgggttcaagtgattctcctgtctcagcctcccgagtagctggaattacaggcgcaccccaccctgcctggctactttttgtatttttagtagagatgggatttcaccatgttggccaggctggtcttgaacttctgaccaccagtgaaccacctgcctcggcctcccaaagtgctgggattacaggcatgagccaccacacccagcctggtcacatgtttaatatcagcttgtcttatgtgagtaatgaggacaaaattactactcagtatggcgcaaagatttttaaaaagtatgacctttaaaccctaatgaaaaacaggtttgatctggtgcttcatttaaaataatacgttgaacagaacattggttttgctaacaatggaggttaaaactcgtactaaatgacattttaaaatatataccatcaataaatatgtacttaggctactaaatcttttacattttacatgaagattgtatgtttaccataaatctctactctgaaatgttctgcctgcagaggttggaattttagagttgataattacaaagagtaagtcaagtttttatcttttaatctgaaataaccagaatgatggttattcccctcacaagaaattcccaccattgtttagatggttgttcaggttttggtcttcagttgggtacttttaagacagaccttacctgtgactcttggaatttttcagttccatttggtaattcagaaacatcatgtgaccagtgacttttcagtgcttttggaaggatattggccactttatcagctttatacacacaaagtgcccattttaccgtcgtttccatttttgcattttgctgaggacttatgtttttggtggcaccctgtctgccttctacatccatttcttcctcaccagccttaaaacggagacgatagggaaagggatgagagcctccctggatatcatttttctttatggctggagaaaaaagaagtctaccacctttatctctcttctcaggcttttgggaagtgaggaggaacagtcctgccccaaagccaggtgagatttgaggccagtggttcccttgagcatttctccagtacctgtggaagagtctcaccttctcttgttcccacatctgtgcatccccttgttctgcccctatccttgaaagcagttgatggggctcctatatccttatggcctggcttattagagccttccagaagaaaagtttgtgtttttgtttttttgttgtttttttttttaagatggagacttgctctgtggcccaggctggagtgcagtgacggaatcttggctcactgcaacctctgcctcccaggtcaaagtgattctcctgcctcagcctcccaagtagctgggactacaggtgcccgccaccgcacccagctaccagaagaaaactttcacacagcctacctaagcttatgttcaagagtctctcttgaaatccaggaagaggctgatattccaagagtgatttaattgtgggatcctcctgaagcagatgaataggaacagctatttaaattgatgtaattttattatgacctccttcacagtggttttcaggtaaccctgctttcttagttaataatgaggttctgtgacccaggtaaccttgatgcacagatgagataatgtggggattcactgatgcaaaatcagaggcaatcctttcataagtagaggtgcctctggccccagttgtttagatctcctttggccaaaaaaaaaaaaaaaaaaaaaaaaaaaaaaaaaaaaaaaaaaggatgtcccattctgacattggagagatttttttttttttttttgagaaggagttttgctcttgttgcccaggctggagtgcaatggcacgatctcggctcactgcaacctccacctcctggattcaagcgattctcttgcctcagcctcctaagtagctgggattacaggcatgtgccaccatgcccagctaatttttgtatttttagtagagacagggtttcactatgttggtcgggctggtctagaactcctgacctcaggtgatccacccgcctcgacctcccaaaatactaagattacatgcgtgagccactgcgcccggtgagagattcttaatcttggaaaactgttttgccaacggagaaaataatcctaatttattctttagtgcaaattggaaaatgcttaataatttggctttgaagcacaaactttaatcatgctgtcggtattttccagtattacatgattgatagttaatttctatagctctattcatgtagaccctcgaataattatatccttatatttcatgttaagctaataatatgaggaaaacagttttaaacatcaggcctgtatttttcattttcttcttaagatagcacattgcaacagttttgttagtgttcagtggtctggaaggtattttggagcacgctttgtacagtggaacattaatagatatgttgttttgtaaacaggcatttgtaacgctataattattatcatgaattttattttttggtatcttaattctattgttgatgttagcattggaataaaatgaaaaaagagtctgtggtaatgaccgtgactattttgggcacttaggaacctgttttgttcactggaacaatgaggaaaaacctggatccctttaatgagcacacggatgaggaactgtggaatgccttacaagaggtaattgataaaatgtaattatctttagtctgttagcctcagtatgtgtatatgtacctttacagcattgcaggaaattaagaggagcttagcggtttaactaactttgttcaccacccaggagatcattgaggatgtggatatgctataatgtgtatactgatgatgatgaaaaccaaaaataaaatttccctggttctcattttaattttcttcctgttgtccaaaacagtttggtgttgttttatttgtctttagcaatgcgttaaactagaagttgtatttatgagttgagatcctattagtgactaagttactctgcaccatttattttactgctctgttcttagggaatttctagtaagggaagaccatagtcgtttttcattaactaaaagatagatcatatttatgaaatgctttaagttttataagaaagtgtttataaaggtaaattatacagttggaatgggataataattatttattggcaaacgtgtaattttaatgcagataacagaaccctgcagcctctgctaaggttttatactaatatgttgatttctagaggatttttctattatttatgtggttcctgttgggccacttcttgaaattttctcacccttgcatgaaaaaaggactttgactattaaggtgctgttggtttgtgtattttaacactgattttctgtgttcagtctagttctgcaaatttgtgccagtctacttgatggcagaaaccatatcataaaactggtaatccctcacaggacctagtttagtcttttgcttttaaaaagtaagcatttaaggctgggtgcagcggttgatgcctgtaatcccagcactttggaagtctgaggtgggtgaatcactggaggtcagaagtttgagaccagcctgaccaacatggtgaaaccccatttctactaaaaatacagagattagctgggtatggtggtgtgcgcctgtagtcccagctactcaggaggctgagacaagagaattgcttgaacctgggaggccaaggttgcagtgagccgagatcgtgccactgcactcccatctgggcgacagagcaagactccgtctcaaaataaataaataaataaataaaaataaaaattggccaggcccggtggctcatgcctgtaatcccagcactttgggaggctgaggcggatggatcacgaggtcaggagttccagaccagcctggccaacttggtgaaaccctgtgtctactaaaaataccaaaattagccagacgtggtggtgcgcatctgtagccccagctactcaggaggctgaggcaggagaattgcttgaacctgggaggcggaggttgtggtgagccaacattgtgccactgcactccagcctaggcaacaagagtgaaactccatcccaaaataaataataaatattaaaagttaaaaaaaagtaagcatttaataagtatgtattaatatgtttgatctcttcatttcaaagaagtgtggagcctggacaacatggtggactttgtctctactaaaaataaaaaaaaaaaaagaattagccagatgtggtggcatgcacctgtagtcccagctactcagggagttgaggtgggaggatcttgtgagccctggaggtcgaggctgcagtgagccatgattgcaccactgcactccagcctgagtgacagagattaatttccctccattgttattgttgttgttttgaattggtgcatttgtcattgttgcccttccagggatagctctgaaatctttaatttatagatgggttttgactgtgagcaagtagacttggaggcctgacagtttcctgccagtaattcttgtttctgaaggcatgtcattgccgagtccttacacacccaccctgctttccagcaactgtggggattttctttttctaaattaggtcgattacttcacctcctgatacttgataagcaattgacctctgatttcatttaaatttgtgaatctctgtacagtgaaattctaggagagaagaggtgggtacagttaactgtcaaatgtaaagaaagataaggcaatcctgtgcccctaaactctcaggacaggtttaatagtgaaattgtgacacaccctaaaagaacaagaattactcataaagtgtttttctatttgtttcagagcttgagattccttgtcacagattctcagagagcaaaagtactttttagaaacacatttctctatgaacagtgaagaaatgttaattgggagatgatcctatcaaaaaccatcatggaacttgactgtaactcatacttatttcatttgttatagccaaaattaaaataaaatttagtagcctctcaagaattctagaaatgatgaggtggaagacgtggtaggtccccctcagaagtgaaaaattatcccatcattgtctttctctgggaactacttctttatggcattgtaggtttttctgtgaatgatttggaagagttactaaaaattagggtacaacattgtatttccagtgtgattccagctgtttttaatcattcttatattctgacacctgacctaagaaagacaccagagcatttacattgctcgtttgggggtaatgagacaaagactggaggagagtgttttcttttctctacagttttcctggattttccaaatttccttctgggtgcttgtattctttttaccttctagatggtcaggggaaaggctgagcactcctaacaaatgaagcattgtgagtttttcacaacaagtttcatgactacaagttgatggaggctgggggcattctgataggtcaggaattcttcccctggggtccgtggagtctgagggtcttctcgtagagaattccaaatcttacttcctggtgattgtaaacgtgaagttatgtgtgtgtgtttatcttgagagataccacacaagggattcagcaccacgactctggtgccattcaagtttctctggacttctctgtcacattctgtctctctgctgtctccatggttttcatctttcattgatatccagttcagaactggataactcatcttgctctttagtaggaaacctggtgtcatttggaaaccccctttaaagcagacaaaaaacatagtcacttggtttataaatgaggccaaactggaaatgggaacccaaactcagagggttggcttgagattaggacagcactgtcagttttttcctctttaaccacttaaaaggtggtttaaccacataaaaaggaaagatgccttttatttcttggaagttttttttatttcttcttacccatgatcccttggaaagggtaatacctgacatgcaaaagaagttcgggcatctggagggagacagtcctatggatgtggttgtgtcatcttggttatttttttatttatttatttttatttatttatttatttatttgagacagagtctcactctgtcatccaggttggaatgcggtggcacagtctcggctcactgcaacctccgcctcccgggtccaagcgattctcctgcctcagcctcccgagtagctgtgattacaggtgcctgccaccatgccggctactctttttgtatttttagtagagacggggtttcaccatgttggccaggctggtctcaaacccctgacctcgtgatccacctgcttcagcctcccaaagtgctgggattacaggcgtgagccaccgcgcctggcctatttttatttatttatttatttttttagacagagtcttgctctgtcgcccaggctggagtgcagtggtgcaatctcagctcactgcaaactctacctcctgggttcaagtgattctcctgcctcagcctcccaggtagctaggattaaaggcaagccccaccatgcctggctaatttttgtatttttagtagagacagggttttgccatgttggccacactggtctcaaactcctgacctcaagtgatctgcctgtctcggcctcccagagtgctgggattacaggcgtgagccaccacaccctgctcgttttttggggtttcttttctaatgctgaaagttatcgtaaatactgaaaaatagtcagctgtaaatggaagaaagtttactagaattagtgccacttcgggcccctaaataagagcaactctgtaaatataacgtaagtaatgattaaagatggaagtcgtttatgagaaaaaagtcaaaagatcacacagtaggtacaactaagaaaatgaatcagcagcacgttatttctgttaattaaaaaacgactttaatactgggatctacaattaagactaggttatatcatgttggaatagtggagaaattatctaatcatgttcaacattgatagaattgctgttagaatacaaggatgtcttgtattcaggacaccataagacagaaatctgcacatcagcagtgtccacatcctctgggccttctattccccacaccttgcacctccatttttcccaggcctgtattgcccagaatgggcttccgctcgcttcgttcacacttagctgtgttcttgttaaaggttgttcccatctgttgagttgctgtttatcacatttcagtctctggcatcagagacttcctttatgaaaagtcagaaagttcaaagaaacatggaaacagaatctgacatccacatgagtctctttgaggctttgaaaacatttatgatgatagaaatgggctgtcttagaaagttcagttcattattttcacttttcctgtagtttcctattttttctaagcttcaaaataacctgatacattgtgtttgaaatgtatagtttcaaatagtatgatttgattttgttttcctgaaattacaacctttattaaatgtagaaaacattaagttttctatattttaaagtataatgttatgatatcttggagccaattaattttataaggactgtttcttttacaatgacatttagtaagaaaattgtatgtaaattctatttctttgtggatttactttgtaatttataagaatagacatgtcacaaaatgaggtatccttgtgacttcatacattcaacagattatgtgtggggaggtttttacataggcattgtagactctggagctatagcagtcatcaagagagataaaatccctaccctcttagggcacaaattcttgtatggaagatagaaaataagaaaatgcatatgtaatataatattaggtactggtaaatgcagtgaagaaaactacagcagtgcatgaaaagaactagctgactgcattattaaaaataggcggctgggcgtagtggctcacgcctgtaatcccagcactttgggaggccgaggcgggtggatcacgaggtcaggagatcgagaccatcctggccaatatggtgaaaccccatctatactaaaaatacaaaaacaaaattagccaggtgtggtggtatgcacctgtagtcccagctactcgggaggctgaggcaggagaatcgcttgaacctgggaggcagagattgcagtgagctgagatcgcaccactgcactccaacctgggtgacagagcaagaatccacctcaaaaaaaaaaaaaaaaaaaaagaataggcagtatttcattgtccaggaaggagcaaaataaacaaaaagaatagatattatctattgatctcttacttggtaccaagcactattgtaaatgctacacatactgactgattttatactccaacaattttaggagataaacatcttcaaaataatcttagtatggtcttatttacaagttaattaggaagctaagatagagaaagttcaggaacttgcccagttggcagagccaggcaggactcatacccatgctgtgtgtcttcaaggctccatttttttattttaaaatgtccaaatcacagaacagtcaaatgaatagtattatgaacatacacatacccttctccaagattcaccatttgttaatacggtattttgctacatttgcttcctctcttatagcccttgaaagtaagttgcagacatttccatgaagttgcagttcatccttaaatatgtatgtgtacctcctaagaacaagaacattcaactacatgacataatacagttatttacctcactgaagaaattgaagagtaatgtaataccattgtttaatatattttcaatttccccagttgtcactcttagtcactgtgttccactgcctccattgtctttttctcagtgctaatacttaaccataacttgaatgtatgataacactacagagggccttcacattcatatcttttttttttaattgagacagagtcttactctgtcactcaggctagagtgcagtggcgcgatcttggcttattgcaacctccgcctccctggttcaagcaattctcctgcctcagcctcctaatgggattacaagtgcccgccaccatgcccagctaattttttttgtattattagtagagatgggatttcaccatgttggccaggctggtctcgaactcctgacctcagatgatctgcctgccccagcctcccaaagtgctgggattacaggcatgagccactgtacttggccatacattcatatcattctcataaccatccccgattcaatcatgatgacagagtctcagaagacactgttatctgggaaatgtgttcattattcttcacctcacaaccctattcttcatcaagtcaatgtggataacctcaaggagggtcaaaacccagaagaatgatgggttggccccttaatcaagggcaagtgtgagattatttcttcaaatctggctgccggtcttagaaaagacctttttgcacttaccagtattatcaaaatcaactcagaaggaaaagctaataaaaactttgctaacatctacttttgatcagttccatcacatggggtataggtctgtgagtatgtttcataaaaagattactcagcaagtcctcttctttgtaatggagagggtttgactaagctgacatattccatcctataattttcagggtaacattttgcaccacgagccaaatcttacacttcggattttaatttcctaccttgcatgctaatgccaaatatcaataccatatttaatcttaactcaaaattcctgtttcttggagttggacttccatcatgagtacaactcaagatcacattcatagaagtgtgcttccgtgtttaaggtacatgacaatgttacccgtttactcttggctttttgttgttgggcattgtagttctgtacacctgcttattggccatcactcatctatctgcttgctgatctcttaattggagatgtattgactcttggttcctctatagctctcaaatgtcacctgagtttggctcttgttctataaaatttctccaaaacaaacatcagtgaactgaaccaccacccaatgtagtatcagatcatcttatagctacaattttataaagatacattaatatcaacatcatctatccccgtcgtctggggcaagatgttatattgtgtcctgtttttttgtgagttttcattcactgcaaaacatttattagactgtagaaaatgtactgacctactttatagccataggggcttaaacttgggaaaggaccagcccaagaataagctcctgatttcctaacaaatgaggcacagtttcccattgtttgcatttgtatttttttaacttttccagttgattaaaaaaccttccaaaatggtaaagtgcctataagatgatatctttggaggaccatacttcctgcagtaattttctttttaaattttcccttgagttatactcactcgtctccaaaatgtgctttgggaaacttgactcaaccagaaagatcctttcaccttttcttcagactctatattgggagcatgagcttcattttttgagaaacttccttccctacctggaagaggggttcttgttggctgtcatgttggttattggtaagggagttcaggtgctgggggacactgatatgatttttttccaacaactctattgaggtctaatttgcatagcagaaaatgctccccttagaagtgattcagtgattttggtaaatttatagagttgtgcagtcattgcaggaatccagttttaaaacatctctcttaccccaagaaatttccttgtgtccatttacagttaatcctccagccccttggcaaccatcactcttattgtctctctaaatttctgtaatcttttaactaaaaagaagggaattttttttatctttctgtattttacctacagaatacttttattgatcatactgtgtttttcttaatgaaattggcccaggcagtattaacacgtgaccctgcatgaacagactgtgtttgctgatggtgataaaggagcatcttgggttccattgtttgttctcttaagtcagaatatttccgttttgtgttgactctaccatctttctcattgaacattaactagaggtaattcagcctcatgtgtgtgtccacttaagttatatctctcgagagaagggacttgaaggttctaatgtctatgaggcttgactacttccatagcggcttgaatgatagcagtcattcttctttgtacatctacaggtacaacttaaagaaaccattgaagatcttcctggtaaaatggatactgaattagcagaatcaggatccaattttagtgttggacaaagacaactggtgtgccttgccagggcaattctcaggaaaaatcagatattgattattgatgaagcgacggcaaatgtggatccaaggtataaagctgaggtccatgtaaccttgagtccacattttaagtgtgtaaatgggaaacatggaatgattctgagaaatatttctaagtgctctgtttgccccagacataacattttaacatggataaattcattctgaaaaaaaaagaagaaacccaaacgtgttttccagtgtcagagatattattcagtatcccaggagagctagattcctaaaatccactcccaataatcagctttaagcaatttggagggaagacatttttcgttgttttatgaaaattagtaaattactacatagatttttatacttgtttttaaagaataagattgtcctaaaacattttaacatgatttttaaaacattaaatagatatgatcttttttttttaaatctctattgtgaagtagagctttttaagtcttaagtctactttttgcatctttacgaaattaaacttaacttctttgattgcagaactgatgagttaatacaaaaaaaaatccgggagaaatttgcccactgcaccgtgctaaccattgcacacagattgaacaccattattgacagcgacaagataatggtgagtccttcacctgcggaattcctgttgctcccaattatgttcactttttcagtttattccttccttgtaaaacttgatagaaacccctagtaagttaattttctgttaattttggctctcttcccagcagtaattcatatgcttaactacaccctcagtgctactaacaatatatccaatgtatctctttgcatataatcatatgcaaaaatcatatgttaaaagtttaccatgaaaatattccaaatctaagattcagcttgtgatgctaactgtcatactacggagtagtatccaatagaagatcacagtcattgtcactgtcacagttgtttcagcatgcttgatccccttaatgaaagatttaggtttttatatactgcaaggggcttgttgggtaaggttgcagaacttctatgctgttgggacgttcacaagatacgtgtcacaggggaagagatgagaagatccatcacaaattattttcagagagggcctagccagaaaaacaaatgattccaacagaaaggatttaacataggaaatttgttacataagaattggagggcttagaaaatgaagggaaacagtgataattttaggaagcaaggccaggcacggtggctcatgcctgtaatctcagcactttaggaggccgaggcaggcagattacttgaggtcaggagttcgagaccagcctggccaacgtggggaaaccctgtctctactaataatacaaagattacctggatgtggtggcaggcgcctgtagtctaaatgtatcatatagacttcttgttgggatttgctgttaccgcattggtgatagctactccttttattatctaatgcttggaagtgctgtcaacttagaaggtctgattagttagagagacagcaagcaaggacagaacttggcagacaagtcagttggtcactcctaaatctgatcaatcagcttctgaccacataaatgtctagttcacaagcatcttcttgatccatcagcgctgttaccattattgaagtgtgcccattagtttattgctttatataccagtccctctaggtagattttgagaaccttaatttttttctctcttgagtaatgtctttatctaaactctgaacatggttctacaaagcaatttacagttggcccctccctacctttctagcctttcctccctctgttctctctctttcctttgcagtaaaagccacagtcctttagttattgtccttcagttcatcaaacgcagcattcactgttgcggtcatgccctctctacaccatgcacaatggcggcttagactatggtgtgagcagtgaagatggtgcaatggatagatttggagtaaatagcaaagtaaagcaactggactgtgatggattgaatgtgagatttgagggaagacaggggtagtcagtcctggtttctctgtttgggacctgactatctggatgaatgaggaagacccggaagaagtaaacttggaggagggaaaggcaagcattcccttggaggatgtaactgttgagatgaccttgcatttcaacatggagctttccttctcactcccaactccattagtgtctccatctatggcgatctctccaatgatattgggagagcttccatttagggctccctggccacgaggtcatcagtggcatcacaggaggtcctaccaggaggtataaatttaagtaaggagtcttattacaagctctgaattctttgtgagaactattttccaatttttcttaacaggcagtggcaggattcagcctcagggaacccaggagacatgcattctgtagcttgagattgggaactggcctctatgttccctcaacccctagctgaaagcatctcctgtattctagagcttctgatcatcagccagctttcaattcgggggaacaccataaataccattcttcctcagatctttgattttggaggtgttttgttttttttgtttgtttgttttttccccttgtttgctttagagataccgttccagaaaacacatgttctgttctgttattctgaaagctgtgaaaacatagagacaagtgaatcagctgcaaagctcagcactccaaaaggcaggctcagggagtggctggggaagtgacagatgttaatgaaggacataaccaacactattgtcatcatgcagtcctgtaattgcaagtgcttaaggtgtaataattacgttttgttgcattggtgaatacttctccacaaagacggatagatatagttttgtttactgtaagtaaatcaaacaaaaagcttgttgggaaacaactgcgacctaattaatagctttgtttatgtgttgactctccaaagggatttacccagttttggttcattaagcgccatcaatgtgttaagcttagaattttattttatgaagatgttctcccagttttaactttattaaacatggtgtagtcttaatgacagctaatttaatcttcatttgctcagttgccacaaaacagtagagcaagacagacaaattagaaatcctcttttttctaatacgcaccactatctccacattaaagacagcttcctccctgtagtttttaggattagctggttacttgtgacctgttttcctttcagccaatagcacagccttttcctccagtccctgcacacccgtccttacaacgctctggattctccctggtagtgtgagtgaacgaggaataagcgaatctgcagttagagaattcttcgggagtgaattacagagaagcaaaaccaggcctgagaaattcagattgtagctcttttctttgtaggcaatcttatgggtgtataatgtatatctttctttctaaacccaaatctctttttagtagcgtttcctcagagaaaacaaactagaaatcgttctagcagaaccagctggagaaacacaactcaaagctaacctgagttttatttaaattctatgtttcatcttcatggaacttctctttaagaaaccgacaacggccacaattagaacatttcagaagaggaaaaattacttcttgaaaaatatgctgagacatttaattaaagtgttcagggggacaaagaactaatgtgaaggtagaaagcacaaactggggctgggcgcggtggctcatgcctgtaatcccagcactttgggaggccgagaagggcagatcacctgagaggtcagaagtttgagaccagcctggccaacatggtgaaaccctgtctctactaaaaatacagaaaaattagctgggcgtggtgccgtgtgcctgtaatcccagctactcgggaggctgaggcaggagacgcttttgaacctgggaggcggaggttgcagtgagccgagatcgcgccactgcactccagcctgggcgacagagtgagatccatctcaaaaaataaaaaatgaacacactgggagaataaatacacacaattgcagagctttggggaagtggctgagtgggtcactgggacctacccttcatcttccccaggtgagaagaatcatttactgtttcaagacctgaggcaggattttaagtaatctttgccacatgccatagtatcttgtcccagagaagagtcacaggcacccattttaccagtgagggaaccaatctccaacgtcagatgactctccgtacacccctttcatcatggtggcccagaaacgacttctgaaatggaaaccctcccaccctcactctgcctgttgctaagtggggtttctctgtattgcttgctgccatagtgaaagctgttccgagcttttcttttcctatggtcaggctttatccttcaccctgccctgcccttcccctgttcctgagatcaccccactatcagcgatggcatcctgccaattaaatggattaaattgttttgcagtttgttcacttaatttttatatctaggacagctacctggaatatctgcagatatttaggcctgataaacacatcttcattgagcttatgtaactgagtaactgactaatgcattccagtataatgtgtttttccttgaccttctagagagcagcaagtgatttgaggtttgcattgctggagagatcctggggccacgggaccaacatcaatgcatggcttagtttacagttttacttgggtagaggaaaggtgaggaccaagcaggagatttcaggactgttttcatgtagctacagaagatatgaagatacaaattcaagattatgcccttttttctgtacaaaaagaaaattcagagtcactttattttgttgtaaaagatctagaatctttggtcaaatcagtaaatacagattgagtcccctaatctgaaatctgaaatgctcctaaatctgaaactttttgagctctgatgtgaagcttgtaggagacactcattggggcatttcagattttggattttcggattaagtatgctgaatctgtaagtatgtataatgcaaacattgcaaaattcaaaagtatctgaaatctgaaacacttctggtcccaggcatttcctaagtatactcaacatgcataaaggctaagtgggtaaagttctattcttagcattttttcatgtgcatcctaacttggcccttgtagcatcagattgttccttattttctcttttccaatatttaatttgtgagtcaagcctctgccctcattcctgctgtgtctcctttttgctttttctctctcttgtctatagccatcaacttgaggcatgtggtcctccaaggctatagcctgaatcctagcatccctatacctccttccatatctgttttccagggccagctagactctttctctgctggatctcactctgtggtcttaccagactgcaccactggtcagtcacccaattgtgccctgaatttcccttcctttgtatttaacttttaggcagtgtgcatggggtgcctgctcacacgtcatgtgcaatgccaggccatggagatgcaacagtgaacaagagcaagcacataaccctgcccttgaggaagtgataggtgagctgtcagacctctcggcatctggaatgaccacggtcctcccacccctcacctccaccaccatttctacgtgtctaagtctgtccattcctcaaggcccagtttgctattttctcctccctgaagctcctcctcagaaattttggccagaggtgacttctgctgctgctaaactcccgcttgttttgccttttttctggcattctagtcacttgagtgttttcttctgtctttttttttttttttttttttgagtatgggcttcctaaaagcaggggctgggacttacccatctttgcctcttccacagcatctagcataatgacatgaatgcagtaagtgtgcaataaatgtgtgctgaataaattcaggaattcatgaaggttcacttccattttcctccaatgtgttttggcagagtgtcacttgctcattattaatcctgaaactttaatgaagtttgttttcttgggccatatgtgggggctcatgcctgtaatcccagcactttgggaagccaaggtgggaggatcgctttgagctcaggagtttaaaaccagcatgggcaacatagcgaaaccccatctctacaaagaaacaaaaattagccaggctttggcggcgtgcacctgtagtcccagctacttgggaggctgaggcttgagtccaggaggtggaggttgcagtgaaccgagaccacaccactgcactccagtctgggtaacagagtgagactctatttcaacaacaacaacaaaaaatttgtcttctttttctgtgagtatatgccaggcacacagtaaataattttgagtcctgggtgtaataggactcaaattgtagtggaaagtgaataggtgaacttttttatgcttacaggcatatttttcttaaaatatgcagttattatccaaatgaaaaggtgtcttagaaaattagctgtttacagttctcattgcccatattttacttctgaaaacaaagaaactgaaagtaaataataatgtacctctgggaactcacatgaagaggaaagaagacaggtttacacccgggttcaaatcccagctctgccatcttccgatttgtgcagcctaggctaagttgtttaacttatttgcacttccatctttatctctggctgtcagcatcttgatagactgtttcttgctcatctttgaatctcccattcctaaaatgatactttggaaatagacattcactcaatattggatgaatggatggaaggaaggaaattaccttatccattctattttgggagttttctgggatgactgtaaaagcagagcatgttcaacccattttattttccttttcaagttcacaaactgatattttagttatggggtgctttcattgatttttatggtagccatactctttgttaggtcatatttatatgccaaggatgccttgtctcaaatcttgcagattcatctgcagctataataatccagttcattataagatactatatttggggggttatttgggattttggggttttttttttttttttttggacacagagtctcactctgttgcccaggctggagtgcagtggcatgatcttggctcactgcatcctccacctcctgggttcaagtgattctcgtgccttagcctcctgggtagctgggactacagttgcacaccaccatgcccagctaatttttgtatttttagtaaaggtggggttttgtcatgttggccaggctggtttcaaactcctggcctcaagtgatccacctgccttggcctcccaaagtgctaggattataggcgtgagccactgaacctggcctatattttgttttaatgcatatcaaaaaaatattaaagaggtcggttttattttatattttttaagtgtgaaaccttatagaagttaaaattttaagttctagtaaattattaaggtcatggttctatcacccctaaactcaaaaactctcctaacaaataaaatgcagttgctaagttgttgatatttataaggcttaaagtattttgaccaaatgatctttctgtcatttttattattaatctaataataataatgctttttgagaacattatttttttttttctggctctgcctttttagattctggtcaattttgagaactcctggtctcagtggcattcatgtgttttcagacaatgagagggaatctggaaagatttactagtcactcaaatgtgaataaatttagtaggaatttggacaaggaccaaatagtagtaggacttcctttccattaaacattatgtaaagtctttacagagaactcactcactctcaactctgtgggaataatttttaaaagtttacttgttgcttttgcagactaaaacttcatcattttagcaagtaatttggttcacttatttacttagtctttagcattagagagacctgtatttttaaattgcagattttttccttcctcgtcaggaggagtggttatgttctgtaatgctatgcttaagtaaaattacacatttggggtatctaaattggcatgccaaattataggacattttaattgttatgtggatgtgacagattcaattattcttgaactcttttgagaaagctgcccttagcagtgattcacagtagtaaacaaaagattaacaggaaaatgccctttatgaggcttaataaatgtgtccgattaaataccatgggacggaattaactgcaatatctacatgtagaaaaacaacctgtgtcctgcttggaggttcagcatattctcttaagataaatttactctaaatatggcctaactgaagaactaagtgccacttaacctcagaactgttttcctaggtacgtcatttgggccaattgttcagactctttcttccctctgaaaccattaaccaaagccactaataagtagaaatgcagagttaagagccccttcctccctctttcaatttccagtggacatattaatgagcaataaagcagctaaaaggcaagcagctcaagaaagagaaagaagcaaagaaaggtgattgggaaaacagatattcagccctcagcaatgcagactgggctgccccgtgtgccatgtgggctgtgatcacaggaatttggagctcaatttcttaattggttctttagtcttatccaaagagaaaattggatttctagagatttcttctgtgcagagagcaattatgctaaagctgcttaggtaacagctttttcggctagcctttctctctcggaataataaagtacacccagagccgatttcagaatgcaccttaacctcaccatccagagtttagcccctcttggcagctgacatgttctagaaccttaaagaaattccagaagcatttacttcttttccattgcttagagtctatgaaactggctcggcaattaatttactgtcaggtctctcccatctgatttttatgacattaccctaccttttagataaatttaatttgactttcttaaatcaagaagtttcccaactctgatcatatgtataaatacccctcaaggctgagagtctgagagttaaaagcactaagtaatgataagaacccaaaatgcctttggcagaatataaaatgccacaggactgctgagtgcccagaataatagtctagaactttcattttcttcctttcctataacattatagtaataaaaggtcaggttaggcctttgtttgcttcgtaaaacagggtaatcaaaccatttaaatactatccaggcctaccacccaaacagattctctccctctcctgcccctttccgaaatattgtctctgttataatatgttactgcaaaacattgtgtttcaatgggtttctttctgctgattaacaggttttagattcaggaagactgaaagaatatgatgagccgtatgttttgctgcaaaataaagagagcctattttacaagatggtgcaacaactgggcaaggcagaagccgctgccctcactgaaacagcaaaacaggtgagcgtgctccaaggagttgtaattaaagtttgtctcagcggctccctccgcacaatttggcaccatgggtatggtaacaagcactgtgtacccttttcaattataagcctgcagagacaaagcttcatgagtgggtcttaacggcacgtcccgggttgaagtaaggtctgcaaagagttggcagaagcgggtaggggttggggggtcgagtgtgtgcacacatgtgtgcatgccgtgtgcccaagaagcggagaggtgttagaccagactttttacacatttagactctgtgggttcagattctcatagaaaaaggcatagagcacatagtactcatattctgcaaacccattgcatttcattcttattgataggcaaatgctgttgaggtacatacaggagatttaagagtttgggcaaaaagtgtgggatattgtttattgttctagaatgatctacctagaaaatgttctacctagatctacctagattgcttttggtttctgttttattatttgtaaagaaaactgttacataatactctcactgttgacctgggttttcccctcattctttgttgtttagaattaggcccatatagcccatatgcttcctccaccttctataagaggcagttgtcaggctgggcgtggtggttcatgcctgtaatcccagcactttgggaggccaagcaggcagatcacctgaggttgggagtctgagaccagcctgaccaacacggagaaaccccgtctctactaaaaatacaaaaattagctgggagtggtagcacatgcctgtaaccccagctactcaggaggctaggcagaagaatcacttgaaccgaggaggcggaggttgcggtgggccaagatcacgccactgcactccagcctgggcagtaagagcgaaactccgtctcaaaaaaaaaaaaaaaaagatgtaattgccatcaggacaaatcaagaatttataatatgttatagctatagcctgaataatccttgaagtatgtttataaggcattaaagacacgcaggctacgtgatctctttccaacaatggtgatgtggaagtatctcattctacagatgtgataactgcagtttgatttaagggacttagccagatgtcacatggtcacctgtaattcttccttaaaattctgtgaggtgagagttgtattgatggagggagggaaggaacatccaatgttcttggcttagggtggaaggagacttctagcagtacatggtgaggctcccatcaaaactgttcatccataggcagtataatatgggtataattttccttcattgttttctgtatttttcaggttttcatcactgtaggtagaataaaattgcttgtttgtgtgtaatattttaaatatctattacagacaacagaataagaaaataggggccaacatggtgaaaccccatttctactaaaaatataaaaatcagctgggtgaagtggcgattgcctgtaatcccagctactcgggagactgaggcaggaaaatcacttgaacctgggaggtggaggttgcagtgagccaagatcatgacactgcactccagcctgggcgacagagcgagacaccatctcaaaaaaaaaaaaaaaaaaaaaagaccaggcgtgatggctcacacctgtaaccccagcactttgtttgggaggccgaggcgggtggatcacaaggtcaagagataaagaccatcctggccaacatggtgaaatccatctctactaaaaatacaaaaattagctgggcgtggtggcacacatctgtagtcccagctactcagggagactgaggcaggagaatagcttgaacctgggaggcggaggttgcagtgagctgagatggcgccactgcactccagcctggcaacagagcgaaactgcgtctcaaaaaaaaaaaagaaaaaagaaaaagaaaatatgttcccatatctaatggtatttctgtattaaagatttatccaaataaaacctaggttgccttcagctcctatttcatctcattctccacagaagtgaggaactatccttgccactgtctgtaggatatttctttgaatcctgcatttatcctcaaaacgattctataaatgcctttgtgtgcacagtattacgctgggcactaacaaatacattaaacatgcccctagtcattgacaatataagccaaagaatagagcagagcagagatttgattgatgtggtgagccctgatggcaatgatgatgatgatgatatgtgtcagatgtgcactgtgcacttctcattatgcctgtttaagaggctgaggcatagagagggaaggaaattgcccatgatctcatagctagcagaattataggcagagtccggattcaagcctggctttaggatcgacaaaaatctgtgttctgaattttcataagaatcacattgtgtatgaataaagagggaagctgtacttgaagcactgtatttcttttatacttgaaatttacagaatacttttatcttctagcgtgtctcccagccaaagcttccctcataaaacccgatcaatcatttgggattccctgtataatctagtcacaaaagagccaggaacctcaaaaaccctttttgttctttggtacctcaggcatttcacatcaaagagatgtgtccctatctatatatcaaaatacctatttaaaaaatatgttatatattatcaaggcatggagtaataagaaataggtcatagaattttagcatgttccaactaacataagataatatagttcacctttgttttacagatgaggaaactaaggccccaagaagtaagtgggccctgactaatttatagcagagacagaattaggaatctttttttaaatcaatgtttaatgcaagtataacatacatatagaaagggacattggtcatagaattgaaatctcaattactggtccagtaatcttccatctaattcaacaatattaatcgtaacttacgttcgtatagttctttataatttattttacattgtttacatagttcttacatgtatgattctacttaatcctcacagcagtctgtaagtcttactgtattgatgaggatgttgggtcatgtgtcttcatgtggacacagagctggtccgtggagaacagaaggtagattgctgggggaggccgatgtcttcccctaagtagcgttctgtgtcaagcctgaaaacgctgctccttgtctcatttggtatccaagatgcagctagtcgcccaaattcacacagtggcagaatttccttcctggattttagtcctgcctaaccactggctcaggtcacctcctctacagaaagacataaggaaatacacagcttgattctcatccaagttgaatattttcttgacatttctgcatacacttggtcctcttaggagaacaagctgtcagattgtcaaccttttaaatgtgcaagcatcaaatatcaatgcatcattcacaactgtaacaccatgaggattagtctaaatcaacaagcttttcgctctcacagattagaattcatttgttggaaggaaaactcaacatctgggaaaaggtacttccaagtcacgtattcttgaccacggagttgctttcctgaaaatgctggtgcaggcaaagctgagtctctcttttgactgacctttgcagatgactcagtattttaatattttaaagtaaatttaaattgcataattacatttcaggtacataaagctgaagggtgcactggtttgctcaggctgccatagcaaagtagcacagactagctggcttaacccacagcagattatgttctcacacttccgtgctggagtctgagatcagggtgtcagcagagctgctttcttctgaggcctctctccttggcttgcagatggctatatgttcacggggtctgttcacggggtcttttctctgtgtatgtctgtgtcctgatcacctctttctctaaggacaccagtcatattggatcagggcccaccctaaaggcctcattttaacttaattacacctttaaagactttctccaaatacagtcacattctgatgtacttgggggttaggacttcaacataggaatttagggggatgcaaatcagcccataacacagggtaaattcaatcattgtcttccctgatgaagccgacctaatttgaggttcccagtgagtaacagaggtgccattttatgcactcatgaaattgccagatacaactcaaaagttatgaaatcctggccaggtgtggtggttcacacctgtaatcccagcactttaggaagttgaggcgggtatatcacttgaagtcaggagttcgagaccagcctggccaacatggtgaaaccctgtctctactaaaaataaaaaaattagccaggcatggtggcgcatgcttgtaatctcagctactcgggaggctgaggctggagaatcacttgaacccaggagatggaggttgcagtgagcctacgtcacacgactgcactctagcctgggcggcagagcaagactccgtctcaaaaaaatatggatggatggatggatggatggatggatggatggatggatagatagacaagaagtcctgacatcctggatcctaggagcctggggcctgtttgaataggtggaggagacacttagcagccaatggccttacagaagtcacccaaggcctgtgagcctcagaggcctcacctgtcatgccaggattgcagtactgctccggtttcttcactgttaacatgtattaaatgagatagtgtatgtttaagtgagtcaaagaatataaggtgttttacaaatataagcgaattctagctattggttataaaagctcagtacttttttaagactgtagactgaactcttagctcccaataatagcaaaagaagtatccaaagttttgtagctttatagactaaataattacaaattatttttaagaatcagcttaccaaatgatatatgctcatgttacaaaattcaaagcattgatagttttgcaaaaaactttaataagtaaaaagtaagtcactctgccacacctgcccttcatcacgcagttcctctgccaggtttcagccctggcaccttcttctccactttgttgatgtattctgtgcataaacaagcatctgtgcatatatagcttttctggtttttgagcacaaataatagctattctttacggtttttcacttaatattatattccatattatatcaatacatatagttacctcattttattttatatgtgtattttttattagcgttctctctctctctctctctctctttctctctctctctctctctctctctctctctctctctctctatatatatatatatatatatatatatatatatatatatatatatatgtattttttttaaagcagtttcactcctgttgcccaggctggacctctatggtgcaatctcagctcactgcagtctccatcaagtgattctcctgcctcagcctcctgagtagctgggattacaggcgcccaccaccatgcctggctaatttttttgtatttttagtagagatgggtttttaccatgttggccaggctggtcttgaacttctgacctcaggtaacccacccaccttggcctcccaaagtgctgggattacaggcgtgagccaccatgaccggccagttacctcattttttaatggctacctagtatttatactttttccactctgtacttttcacttttcccaattaacttccaattaagttagctatttttgtttttttcctggtgaatgacttaccagatttatttactagtttatattctgttttccagttgatcagtttctgcttttatctttattacctttgttttttggtttttctcgttgcttcttcttgaatgcatttgtgtccattctttcttccttagtattttagcgctgtgaattttcgtattctgttggttttgatatgtagtgctttcactcatagtttattttttatttatacattctgcaattttggattttaattttctctggcccagaaattattgaagagggaagtttttaaaactttttggtggtagcggtttgttttttctgttcatttcttttctgttttacgcatcagtttcattttcattgcatgtcatccatatcctttctatccatttggaattttctttgtgtcctagtttttctagatgttctttgggcattgaaaagatggtgttatctgtttaaggtatagagtttaataaggtttaattagttctactttgttaattacattcttattaatccttatttatattggtctattttctgtgacttggatctagaggtgaattagtttcacactgtacatatttctctttgtagtacctgtcatttttgttttggtaactttgatgctatggttttcagtccacagatgttcataacttgggtttccactatgaattatatttcctgccattttaacacacctttctttgattcgtgtaatggttttggtcctaaatccacactggttcaaaactagactgggtcgcgtgcttttactttgctttctttgtctgctatatatgggattgtctttgaatatccaaaggtgtgtctcctgtatatggcgtggttaggttttactctgaggtttaatcttagcctttgtttttaatagatgattttagtacatttacatttattgagattataagtatgttttgtcttagttctgtcatgttatgctttcagtttttagtattcctttttaccttttaatttgtagtagataatttttgtttctttgaatattgttttgcatgtgttccttttgtttcctctaaatgctgtttcttgactccccattataaacaataacaatataaatacacttctgtctccatcctaccaccaaattttagcttagtttttcttctatttgccttcaaaccccaaatatacttaagcctctgttatttggcttttctttaaatgatactttctccatcttttagttagctaaagtttatccttcagtgctttttaaacctcaggctacaacccactagtggtgctgtggaatcaatttggtccatcatgactagtgtgttttaagatgtaaaatagaatacaatggaatagaagaaaaataacatgtatctttcatagtaatggtaatattttttgaaatgcttttcagtatagatacagatataggtagtggatgcgtaccaagtccctgtgtacagtgaaatgtgccacccattattgtgggtggcagtttaaaaaaaaaaagttgcaaaacaatgctctataccatctcaaagggaaaggttccttggaatttagaatccctgacttattgcatgtctgaaatctttgttacccctctgatttaaatgtggtggctgtaccatggcacacatttacctatgtgacaaacctgcacgttctgcacatgttatcctggaatttaacataaaaataaaaattttaaaaagttgtggatataaaattattgggtcacaccttctttcacttagtatgttgcagcctttgctctaaggtcttctcgtgttgtctgttcatatggagacatctatgaccatgtttgacataactcagccttttttctttctttctttctttttcttttttttttttgagacagggtcttgctctgttgtccaggctggagtgcagtggcacaatcatagctcactggagccttaacctcccaggctcaagcaatgctcccttctcagcctcccttaaagctggaactagaggcacatgccaccatacctggctaattttttttccccccatagagacaaggtctcactgtgttttccatgctggtcttgaactcctgggcttaaaccatcatcccaccttggcctcccaaagtgctgggattacagatgtgtgccactatgcccagccagatcttttttcttgtatgctgaaagggtcattagttttcctaggacattattgtgcagtctttcagactttgattcaagttttcttttttttctggaagtttacttgaattatatccttgaatttttttatttgattatattctcttctttacaaatatctatcatgtatatgttttatgtcctttgtctattttgtaaagctattttctccttaatcctttttagttctttattaacttttagttattttgtttgtttgctcaatcctatcctgtgtctcacactgttttttcagcattggctaatctttgtgctgccttcagtagaaatgccacttatttttttattttttattttcccttttttgagacagagtctccgtctattccacaaactggagtgcagtggcgtgctcttggctcactgcaccctccaactcccggttcaagcaattctcatgcttcagcctcccaagtagctgggattacaggtgtgcgccatcacaattggctaattcttgtagttttacaagatttcattatgttcattatatgatacaagttttcattatgttggccaggctggcctcgaactcctggccctcaagtgatcctcccacctcagcctcccaaagtgctgggattacaggtgtgagccattgcacctagcccatttctttgatattttcacttttcttttccacttcacttttgaccactgtcaactcatgtttcagcatcttctgttgctctgccatgttttcctgtatttttgtatctctgttatgcacagcctgatcattctgctgcattttctttgaatgaattatattcataaactctatgtgctcaacatttgtcatgtgtttatcttacttcatttcttatttgtataatctccaggccctgtactactcttaaaattataataataatttttattattcctactcctcacctatgactaaaacgaactcttcctagaccagatagttacaggatagttgtggctagggccttgtttctggctaaagggaattttctgtgcttaatgtagaagtactttatgacccagagaggctgcgtgtgtggtgggggggatgcagggagggatgtgagtgtgtatgtgtatgggtgtgtgggtgtgtgggtgtgtgtgtgggtgtcaggggatgtgggtgtgtatgggtgtgtggtgggggtatgtgtgtgggggtgggagggtgtgtgtggggtgtgggtgtgtgtgggggtgtgggtgtgtgtatgggtgtgtgggtgtgggtgtgtgtggggggtgggcgtatgtgggtgtgtgtgggggtgtgtgtgggggtgtgggggtgtgtgtgtgtgtgggtgtgtgtgtatgggtgtgtgtgggggtgtgtggggggtgtgggggtgtgtggtgtgggtgtgtgtgggtgtgtgtgtgtatgtgaaattgagagtgcatgttttgcctttcttcctccttagcttacagaattgggcaattgcaatctgtcttctgtcaggacctcaccaatgtacataggtcagtcaaagatgtttctaattgattctttattgacataccttagcgctcctccaattaactggagaattcctatgattgttgaggcttgctcttcatagacatcttctcagccttgccacagccccattggttccagttgcatatggcagcccttcatgatattttaccattcaggctctcctgatttcacaaagatttagcttattttttattaatgaatatctttgatgttcagagtggtttctgaaaggaaaaggagaggaaattcattactccattatattaaaagcagaagtcctttctaagtctccattactctttgacaatatgcatgccaattatgtacaccaaaattagactggctttaaaaatgatgaacttgaggccttgagagttactgtgattgaattagggccatacacatcagtaaaaatgaactgacagggtcttgagcctgaattcaacacatcagatggtatcttaggaatgcaatgtcaatcaaagcccagttgctctcctttgtccacgtgcgggagcttgtattgctctgttgattttagtaaaatctagctctgttacggtggctttactgatgagttagagtttaaatatgaacttagtttcaacctacattagaggaactataatggagcaaactcaagagaagaaggaaaagagggacaaggtttcccatactcactgacctgatactcttcttgccgcaaacgtgaacgcttatggcattgtctcccttaagcttcacagtccttctgaactgctgttattatccccttttgacacatgaaaatgctaaagtacaagaagctgagtaacttttttttttttttttttttttgagacagtctctcactctgtcacccaggctggagtgtagtgttgcagtctcggctcactgcaatctctgcctcctgggttcaagtgattctcctgcctcagcctcccgagtagctgggactacaagcgtgcaccaccatgcctggctaatttttgtatttttcgtagagatggggtttcaccatgttggccaggctggtctcaaactcctgacctcaagtgatccacctgccttggcctcccaaactgctgagattacaggtgtgagccaccacgcccagcctgagtaagttttcaaagccaccagttcaaaagtgttcatactccatcttctatgatctttcagttctacctttctgcctcccaggttaccatattcattcagttgaaattgtctcagccacagctttgggattctgtaaagataaaagatgcaccagagggattcctaaatgctttgtcttcatccttcgagctgggcgatacctccacgttctgtgtgcttaggggccacttctctgagcagcattcatcatgacacccaacactaatgcagcaggttttcaacctgtagtttgtagccattaatcagttcctgtgacgtaagctattgttatctcatgttacagatgaggcagctggtagagagagtggttaggtaatttttccagaatcagcagtgaatccaggagagagctgagactggacctgtctatcccagacatagcttacaacatgagggctttgctaaaagtagttcagtaatctcaactcccttcatcacctgcactgtaaaaaagatgtttcatctcacctgtgctgttacccatagtgtgttataaaacctggtagcagaagagaaaaagaaaggtcaaatcaaagaatatatacacaggaagtttgtttttgactaagtatttcagaccatgaagctaagaccatttgggtttaaagttgctaataacaacactttctttatatatatttaaaaaaatacatcaagagggttacacagaaggaagcagcctatttggggaaggctatcaagcagtagaaagtgatgtgaatgtctatttgttcttttggctgtttttagtttcactacagaatagcctttttggagtacataaatctataaccacacaaaatatggctagcttaaaaaagtgggagagggagatgatatgaaattatcccctgaaaagtcttacttttgaacacttgcattataatggaaatagcctcagatttcttctggtggcattccagcattattggacaatttattttctccttaagtgacattttagtacattgtgtgttatatgtaatgatatttctggagtaacaagtgtgcaagaagtgagagaaaaagaaagtacacttaatatgtaggcaggtgtctcagcactttcttttttgtacgtgaatcccattatctccagtgataactttgttgacagcacccaccaatatattcagagcaaggttttataaaatagatccagaatcgtatgactaagagacccaggtgacacgtgtcagcctcagatagttgctacattttctgttttaaagattcaaacaaaacttttcacattcttctttggggaaaaaaaattacatttgaagtcctttttcacccaaacacgttttgagataagagctcacaagtcttgacattatttcattttgttatgcgcatctgtcaaggaaccaagatacgatacagctactaaaaactgatgattgtggaacagagaaacttgacagcatttcatttcctttatgttctgattatacgtttatcagaaaacctgtatctcttctagttcagctagaaattggtagaattcaggaactcaaaggcttggcaaagaactgtcctattatttggtatcatcttacattttagagaagttgcttggttgagtcattgttaaagcttttgcttctcttttcattattgtgggccactatccacagaccacatttctataggccctataactgctttgccgcacaaattaaacgccgggatgtttcatacgtatatgccagcatttcaatgcttgtcaatcagagtttataaaatatagggattacaacttgatattaacatccaaatctattgtgctcattttacgtgtgaaaatgagaaaccctcatgcagacgctagatttcccagcctctttgtcaccctgtttttaatttatctccaggttttgagtcagtaaaatgattccgcttatcaatttaatacagagataaaacatatctatgaatcagagtgatcggaactaaaatggatctacaggttgtttggcattcagcccagccctgctgagggttttagtggggctaatttctctgtacagtagattcatccctgttcttaaattgtgcctcagtgagggatatgatttgcttcacatgaagaagtagacacagaagtgcattgtttcagggaggagactttaaaattttgaaacattctttttatgcttaccttttttttttctaggtatacttcaaaagaaattatccacatattggtcacactgaccacatggttacaaacacttccaatggacagccctcgaccttaactattttcgagacagcactgtgaatccaaccaaaatgtcaagtccgttccgaaggcattttccactagtttttggactatgtaaaccacattgtacttttttttactttggcaacaaatatttatacatacaagatgctagttcatttgaatatttctcccaacttatccaaggatctccagctctaacaaaatggtttatttttatttaaatgtcaatagttgttttttaaaatccaaatcagaggtgcaggccaccagttaaatgccgtctatcaggttttgtgccttaagagactacagagtcaaagctcatttttaaaggagtaggacaaagttgtcacaggtttttgttgttgtttttattgcccccaaaattacatgttaatttccatttatatcagggattctatttacttgaagactgtgaagttgccattttgtctcattgttttctttgacataactaggatccattatttcccctgaaggcttcttgttagaaaatagtacagttacaaccaataggaacaacaaaaagaaaaagtttgtgacattgtagtagggagtgtgtaccccttactccccatcaaaaaaaaaaatggatacatggttaaaggatagaagggcaatattttatcatatgttctaaaagagaaggaagagaaaatactactttctcaaaatggaagcccttaaaggtgctttgatactgaaggacacaaatgtgaccgtccatcctcctttagagttgcatgacttggacacggtaactgttgcagttttagactcagcattgtgacacttcccaagaaggccaaacctctaaccgacattcctgaaatacgtggcattattcttttttggatttctcatttatggaaggctaaccctctgttgactgtaagccttttggtttgggctgtattgaaatcctttctaaattgcatgaataggctctgctaacgtgatgagacaaactgaaaattattgcaagcattgactataattatgcagtacgttctcaggatgcatccaggggttcattttcatgagcctgtccaggttagtttactcctgaccactaatagcattgtcatttgggctttctgttgaatgaatcaacaaaccacaatacttcctgggaccttttgtactttatttgaactatgagtctttaatttttcctgatgatggtggctgtaatatgttgagttcagtttactaaaggttttactattatggtttgaagtggagtctcatgacctctcagaataaggtgtcacctccctgaaattgcatatatgtatatagacatgcacacgtgtgcatttgtttgtatacatatatttgtccttcgtatagcaagttttttgctcatcagcagagagcaacagatgttttattgagtgaagccttaaaaagcacacaccacacacagctaactgccaaaatacattgaccgtagtagctgttcaactcctagtacttagaaatacacgtatggttaatgttcagtccaacaaaccacacacagtaaatgtttattaatagtcatggttcgtattttaggtgactgaaattgcaacagtgatcataatgaggtttgttaaaacgatagctatattcaaaatgtctatatgtttatttggacttttgaggttaaagacagtcatataaacgtcctgtttctgttttaatgttatcatagaattttttaatgaaactaaattcaattgaaataaatgatagttttcatctccattcaga

SEQ ID NO: 2 - DNA, 1708 bp, Homo sapiens
cattcccagcctcacatcactcacaccttgcatttcacccctgcatcccagtcgccctgcagcctcacacagatcctgcacacacccagacagctggcgctcacacattcaccgttggcctgcctctgttcaccctccatggccctgctactggccctcagcctgctggttctctggacttccccaggtaaggctgaagggagagtcagggtcagaggcagtggggggctggcagtgggtaatgtctagatctcagattgcttggcactggacgtaagggacatggtgagttcaggcaaatgcttaggtctgtatatttcggtgagcctggcaggtccctgcatgtgtgcctgtaagtgtgggtgtccctgtgcccctgaatcccaatgcgggtgtgtcttttagcacatcctggggcctatggctgtgactgtctctgcaagctctatttcctgctgcctccgtttcccaggcagaaggagatttgcttaaggtagggagaatggcagacactaagccaaggctgatattcaaaaattttagcaattaataaggctcctaacaccagcctaccctaccccacgcccctcccacactgtgacctgcattaactctttacttgctggattgtcctgggagagaggttggggtgatcagggcagcaggaagtcatttgtggggctcagggcagtggttatttacaaaacagtttagaagtatgacaatatatttagcaaccagtagagccagagccatattggtgcataatggctgaataccaggtctaactcctccccgaccccaccagacacacacacacacacacacacacacacacacacacacacacacaggtgtcctcaatccgagctagggccatggccatgccaccctcaagggtccctgtgtcctgtcaccttctttccccatcccagccccaactctgagtggcaccaatgatgctgaagactgctgcctgtctgtgacccagaaacccatccctgggtacatcgtgaggaacttccactaccttctcatcaaggatggctgcagggtgcctgctgtagtgtgagttgtggggagggtgtctagcctcatctcccgttttagcccctgttgagactcccaccttcttattccccttctccatgccaagcccaaccccttcaaggaaatccctgaaacaggttcccagacatggtccccaggcatgctggattctggggctccattctctccggcctctcaccccaggttcaccacactgaggggccgccagctctgtgcacccccagaccagccctgggtagaacgcatcatccagagactgcagaggacctcagccaaggcaagcctggccctccctggccctgtctcctccctctgagctcctgtctaagattccagcccatgatccttcctctccttcctcctctagatgaagcgccgcagcagttaacctatgaccgtgcagagggagcccggagtccgagtcaagcattgtgaattattacctaacctggggaaccgaggaccagaaggaaggaccaggcttccagctcctctgcaccagacctgaccagccaggacagggcctggggtgtgtgtgagtgtgagtgtgagcgagagggtgagtgtggtcagagtaaagctgctccacccccagattgcaatgctaccaataaagccgcctggtgtttacaactaa

SEQ ID NO: 3 - DNA, 83528 bp, Homo sapiens
ggcggagagaataaagcagaaagacaggaagaggaggtggagttctacagttagtgtggttttagtttttcctaagaagtggcgtggtttggggctttatatccgggaggagcatatgtacgcaaatcctggggcgtttgcaaacccggatccggggcgtctggccccatgcccggccgggcgtttgagggctactgccacgcagcgtttctggagcctgccggctggtgccctggtggcctttatctctgtccccctttgtcctctttatctcaggctctccaggaggccggggggcccactccgcctatcgctcccctcggctacgctgccacttcaatgccccgcaggtcgcgagctgctgttctttcgaaggcgtcggagaaccaggggcgtcccgcgccacctctgactcggagcagcgccgagcactgacgctcccgcccttgggcaaggacgccagtgcgcccgcgcgcgtccctctgcgcggcagcccgtcgcgggccctcaaggggaagcccaggccaggatggccccgggtcgcgcggtggccgggctcctgttgctggcggccgccggcctcggaggagtggcggaggggccagggctagccttcagcgaggatgtgctgagcgtgttcggcgcgaatctgagcctgtcggcggcgcagctccagcacttgctggagcagatgggagccgcctcccgcgtgggcgtcccggagcctggccagctgcacttcaaccaggtaaggccgccaggtccgggcagccctccgtactgtgggtgtccctagacttcactttgtatatgagccgtttttatttgggaaaagtgcaggagaaagaatcttgttatatttctcaagtagaaggcggtatctggtgacacttgcttttcactagacgaggctgaaggattaaaaggttaacgttgttaagggatttggcagccggaaactgcagttttacgcctgatgaactgagaggtccgactctggtgattttaacattttatagaaaactttatgaagtagttgagggtgtgacgccactttaacagatgctttttagataggaatgagttacttaaatcttgccagaaagataacggctcgcacacttcctacaaggttagcaaggaagattatcacatgccaccctggttaacagttgcccggtgcgtaaccagtgctatttgaaaacgagatataatgtagttctggctcctgtgtacattacatgaggcattcagggctgaaacaggggcggccttgagactaagattctaatttggtcatccagatggtggtagactaggcttatattgttagttccttgtcatatgtcaggtcaaatatttgattctagtatttatccaaaatgattaaaaaaattttttcagtaataaacagggtactactaggcatttggcaataccttgggtttaagaacaagcttcaaactacgtaggagcagttaaacatcatacctctttgtaaacataaaatcaaattattcctaattatttctataataaatactctgtgattgggtagttcttaaaattgttaagtagacaaagtgtagtttctgcatccttccaaaactgctctccgtcttttaaaactcagttaactcagtgctttgacttgttttcctttactcctgtcccactgacagctgatattggagggtagaatacggtattttccatatcgtttgtcatttttggacgatgttagtttgttacaagaagtttttggggtccaagatgtttgggaaatgctgcatattatactctgctcttggaaatttggcgtttcctaatgaatatgactttagattacagttagggaaactgtaatcaaataaattccatgttaataacattatacgtagattgatctttttgttagaaatatcttaccacaattaaagtatatggctcttaagaaaagtagaactttctgatgccatggcatgtcagaggtggtctctctttgatctagaagggttttgtggtccccttatgcatgttctttagtaaattgtctataattccagttctgggcatggtattttatctggggtaatatctgagaaatgatgtgttggaaaaatggaaatgcccacaaattatgctaatatttaagaaaataaagtgtttgctggctagttgcattcttttcttatcaaataggggaaacaactgagctgactccagtatttccaggtaggtatggtcacgtgcttggaaagaagtttagaggattgacttgaagctgcatatctgtagcccacacattgttttgacttgcatgacctccttatcttgcagtgtctggaggtgttgatgaattttaaaggggcaaaagacctccccacatcacctttgcaaagacattggaaaacatgcctaaattatttaggaaaattggttaagtgtaccagtaatacgattctctgtttattagcaggcaggatgtctcaataggtaaaattatatgtatcttgacacctgttttctcattctcatgtttgcatatttaactgccctcattatggcctctgtgggcatcaaaaagagacaggaagaagcccataattaccttggaaagaaaaggaagccaaggaaaatttaccacttaataagcctaacaaacatctctttgatgttcttgctttttttttgagactgagttttactcttgttgctcaggctggagtgcaatggcacgatctcagttcaccacaacctccccctctgggttcaagcaattctcctgcctcagccttccaggtagctgggattacaggcgtgtgccaccacaccgggctaatttgtatttttagtagagatgaggtttctccctgttggtcagtctggtctcaaactcccgacctcaggtgatccgccggcctcggtctcccaaagtgctgggattacaggcatgagccacggtaccttgcctgatgttctaaaaagtcctaatgatgacaataatcattggttaaatgatgacaaatgaaataccaatctaaaagaatccattgatttgctggtaagtgatggacttgagcccacaacattcatgtatgctccagtgtgaaaccacccaattctggagtaaaattttagggtcattaatgcttacataccctgaggaatacaacttcagtttcctcacagggtggaataaacaatgcacatgtctattgtgagacactggtttttggctttgaaaaaggctaagaagataaaatttgtttcaaggtccaggaatttattgaatcttctacaagatttagttttcaaataacattgttcttttggttgagggctgtgatatttattaggtcagcttttctcaggtaatagactaatgaactctggagatttgttagacaattttggaaggttttctaaatatttttcttcgtatccttaagtaaggactactaaattagcttgttgctttgggatatcaaagaggtcagagttcaaactgtagacagtagaacaattgagccaatagttttgcttcttatagctactgacagtgcgaagagttaggtagaagcagtgaccaaaacaacaaagaagagggagcccttttagccaaataggtctctggggccctcatttctggataaaggtctgatctattgaggggagttcctagaatacacagggaagccccaaatatctggatacccctgggttattaatctaggacatttaagaatggcctcagtgctgccttttgtttgttcagctgttcctttctcattcttcaaatgttccttttcctcatttcctctttcaaacactgtattttcaagttcttatgtgtagatagtggttaaacagcctgataaaaggaagatcctattttctaaattatcacactgagctgctggaaatgcctccattcagaatttcttcttctgatatatattttttgatatatatcttgcagcccatctcctgtagtgcacatagtttttttcttctcacatttctactggtaaccaagttctgtttttaacctttttcagttcatattcagtcttctcaaagcaacactctttcaaaaagcctccatgaactgtctcagctggcaaactctaaatcttgagcctagcatttaaggcctgatcctcctgtgtcaacctacctctccagacctagcacccactaaactaaactactcactgctctatggattcccataagcttttgctcaaccacttcttaactcattatcttccttggacctttcctgcctttgactgaaatgttcttcttttccttgaattgccctgtgaaaatctactctcttaagcccagttaaacttcaccataaaacctttctggggtatcacagccagcactgatttactgatttctctattttctgaattcctgaaatattttttaccatgctgatgtcacttctattcctgtgttcagcagacattttaaatgactgctgcactctaatttgaatggttatttaaaaatacaaatctgatcatatcattcatcctgttaaacaattcagtgacttttagataaactacaaacacttagagtggcttcaaagtccttttctgatttggtccctgtatgtttcttaaaccgtatcctttgtcacagttccaatcttaatggaccatttacactgcctggttctctagaaatacctgattatgctctggtatcagtttagacattacttcttctgagaagcctttcttgatcttctcaagagtgtagtcgaagtcccttcaatgcaatcctgtatttcttggtgcttgtgcaattataacatattatatattgcaattatattataacatgtaaattattttatatgtattacagttttctgcttatgtggctataacccctgctgcctctctctaccctccaaaagatttttaacaagttgaagggcatggtctgactcctctctctagagactagtgtagtgcctggtttataacatgtattcattataatttttttgaatagatgggtgaagatggtttaagatgagtttgataatttgagtcctcacatgactttacagtctattggaggagacatgacatatgcacatataattataatgcacgaaacagtgatatgcctgattaaggaactaacccatttatgcctgaggttgcaattttttgaatttttgcaatcagaccttggcaatgaccttgagcagtgggatataaataactcccacatgcttagtgtttcaataatggaacactaggaataaatgtgtttaaaaaccaatgtgagataagacctgtgttttcagaacattaatctgacatgagagtgtggaatgtattggagtgggtcaaggtgggagctaaggagccatctgcagtggatttcatgagatgtaaggaccacttgaatttggagaaactcagaaggtaatataaaggctctgccttcagagacttcaagaagagcaggcatggctgaagagtatgcaaaaggccccaaagataagccttttctatttcaatattttgcctgtaatcattatttatttaagtattgctagatctcttccttcattatcttctgaccctgtgatgccagaaggagaaagaataactccgggctcatattaatggatggccaggctagtggtatgtagcaaaaaggagtgtatgtatgtgtgtggatactgcaaacatgttttttgcattgcctgttgtcatctactgcactttttcctggggtgggggtaatgatgggttagatgagggtgtttctgggaagcactgactatggacagaagagataaagaacatttgttcttttttttttttcccctttatgtgctgagaaatggtgggggtaaaccttctaggaatgccttctaacctgcttgttcaggtgagaaactggaagggcaggacagagggtgaggttacctaggtctcttgttaagaatcctccaagacaatggccccattctgatctattagatcactctcacataagttgattgtgtacagtgtgttgattgtatttcaaggctttgggaaaatgagggacattcgtaattcatttgactgtgatgtcaagagcttagtttgccttgatgccaggtgtgattgggatccattaggaaaatgcttttcattcctttcatatctaactcccaaaatcacatctttacccactattctaggagtcatatgaacccttttatatgtaatgtaataattatagctaggatttattaatcttttactgtgtggcattactcccttaaccaatttatttgtattatcatgtttcatactcataccaactctatgataaaggtcccattattatcttcattttatgtgtaagaaaaatgtggcacagagaggttaagtaactggaccaacgtcacgaagtaagtggtagaacctcaggcagtcttacacactatgctatagtgcattttttgaattacaatctagaaaaccatactttctctagctagagcaaccatgaccttagattttgaactacagggagaagttactagtcatcgactgcctatctggttacattgcttagtcacattaaggaaatggtactagagctgtggaggctacgatgatgatgacttgtctttgtcctcagagaccttataattaagaaataagatggaggctgggcgcggtggctaacgcctgtaatcccagcactttgggaggctgaggggggcagatcacaaggtcaggagatcgagaccatcctggttaacatggtgaaaccccatctctactaaaaatacaaaaaattagccgggagtagtggtgggtgcctgtagtcccagctactcaggaggctgaggcaggagaatggcgtgaacccgggaggcagagcttgcagtgagccgagatggcgccactgcactccagcctgggtgacaaagtaagactccgtctcgaaaaaaaaaaaaaaaaagaaataagatggaaactgtgaaaagtgactatggaaggcaaagctgcagtaatcacgaaagcagacattgtaaaacatatcacaaggccatatatgattgtcacatggatactagaaaacatctgctactagtttagaaaggtgagggattttttggggttggaaatgcctcatggaaaagttataactcagtcaatttggcttatctggtttggtttttaaaaaatttattgattgaactcttgcttataccaaatgtgatgaattttcatgtgaattacatgaattcttttttagaggatgaaattttcttttattgtttcatatataatgaatttttttaagggactatattttgagcaacaatagtactttcttctatggatagacttcaggcatgtctagtatgaaacctttcagttcatttctcacttttatgctagaagttttcggccaatgaatccactgtctcttctggcggtttagaatggaaatcttcccttatgatgcctctgaagcaattgcattcttaactgcacaacactggagaaagtggtttgtgcataggtgttggggaatgagttgaagcaaggagggaagagtaggtgagccgagccaagtacttcaacagaatcactgactcttaactataggtaagacagtgctgctaggaggcagtttgagctttctcacacagttatcaggtgaactttccataattgggatagatctttctctctagggatgttccctagggttgttctctcatctgggtgggagatttgcagctgttatgctttccatgatttattcttatcttgggatatattgaggggcagggacttagttttctgctttctagtcataaaaacctattacttttcaaccataataattgtttaaaggtgttttctttaaatttaatatacttttgattctttttttttttttttgagaaaagtgaattccttttggtggtagtagggattgggggagaaaaataggaatataaatagaaatggaaaataaggcctgaagttgagaaggatcagtgatcctcaggaaaagaaaagcaacatctaatgaaggcaatttaatgtggctggtaatgggtttgcaagttacttgtattccaagtggtgtttcctcaagggatgtacacattactaagtgcaaacagctagtattagggtcatttacaatgcaatttattttaaaaaaagaatgttactaaactctaggctatctaaaaaactaggtaattttcagaattttcccatttccaactttatataacagtagattcctgtttgtaatcaaaactaattaatttattctcaaattattcccaattgtctgtttcagtagccttgagatttattttataaagaaatgaacctttcatcgaattacctttgtgttgataggatttgggagcatagaaaacattcagaatggagccttgtttaatttggcttccgtctctttctaaagatactctgttgtttttcctggcctgaagtttaaggagaataaaaacaaaaatctgttgagtctagattaaaggtgaacctgaaatgtagcattatgccctccaaggccaaatatttaacaccttgactttttttctttaaataactaattgaatagctagagaaaaaaatcaagtgagcattgataatgcctctaagtctttagttctttgaacctaattaaaaaataaaccataattgtaaccaatttatttggtgagcttcttagacctctaactatcttagagaatacagcataatggtttacaatctggcttctggagtcaggcaagcttgcgctgaaattctaattctcttgtttaccacctgggaaatcacagccaagtgacttaccctctttttgtaatccttagttttcacatccgtaaattgagaaaaaaagagccttactcataggacagttttttggactagaaaataagaacaatattaacatttattgagcatttaacatatttcgggcacttatatattcagtatgttatacgtgccaactcaataaagatataagacttttttccattacctatattgcttccaataatacgtaatacaaaagacaatgtatgtaaaatacttagcattgggcctggctcaaattatgtgctcaatgcatagttattatcatcataatagtatgttactcgatatagctacattatccttaacaaaattgtcttccattgatgatctgaacacccaagcgtctgtcaactaaaagaagaaagcacagccatgaaaagacagcaagaattaatgaaaaaaaagatcagtgagaaataagtcagtccagtgcctttgatttcagtcttggtttccatggtgactcaccttcagagaggcttttacagtttacctccacttccctttctccaaacactggtagtaaattcttgaaaatgtaaaccttaggagtagagactaataaaataatttgagtacttcaatgtgcattgaaattattacctcccttccagaggacttctgatgctacatttagaagttggctttattttattatttttgccccagattggcatcaccactgaaatgtgaatgtttggggaaccatataatacttccagaaatggatagaattgcggttttaaattgagatctacttctaaatctgtatggacctctatatgggttttgcaagccgaagaatccaggaccctctgcatttagctgaaccctgttggatagaaaacagataagagaatgagcattattttagtctaactggaagaagtgagagatgtatctcttcagcgacagggaaacagaaagttagcccgaacttcagcgaacagtaaaatcagtacaccgattctgagcttggcaaaagttcctgctttatataaatattcatcatatgttctataaaacatgcagtcccttatgttaagagatgcatgctatgatggtaccaggtaatagagtttgaatgttaaatcataatgctctacagttttcttcaggagcagagttccccagaacgtaagtatattattcggttacttcacctacacattagcatgaacagctagacactggctctgtctctagtcttgggatgaacgctgtttaagtaaatgttgtgggtagggcctttactgtggcagaggaaacaggtcctgtcctagtaagaatatttactaacaattacggagcacttcttgtgttccaggcatcctgctcagttcttctttatacaccattctgttaaacctcctgatcccatggagtaaacactcttgttattcccttgaggaaactcaaccttaggtaggttaagtaactcactttaaatcagatgactcatattggcagagcacatattccattccagggtgactggattctataaccgatgcactttccactattgcctctcatgctgaagagtatcatcccacagaaggacttattttccaaaaagccaagtgcctcttgtgtcatccaagtgcctgaatgtcaaggtagaactaatgccattttcttgaagccactgggaactgtacaatcatttatttgaagctggcatatgttctctgctgatgttcccctcttgtttgagtgaaaagagggaaaaaatgtcttttcttccccttgttaaagttgtacttgcaataatcagggccggccctaaaactcattattacttcctctacaaactagtttttaaccttgcaaagttatttcctgacaattaacatttgatactcgaaacaatattgtgagaaaattgggacatatcagttcccccagaaactgagatacgaataagtcatttggtaaaagttagacaaagtccccagatttttctgggagaccagacattccaattttgaatcctcagttctttttccttgggctaactttaatcagatgctgtattagcaaggccacggtgctctgactaacctgaatattccatgatctttgtgtttcatttactgtgtataactggaccatagaaaggtgcgaatgcctgttctgttttctcacctctcagtcactattcaaaccattggttctggcttttttctgtccccaccacttccctgaaatttataccaagtcacatggaaccaccttattgttaggttcagtgggtgcttctcaggcctcaccgctctgataattttgttggtgttgattacatcctacctgaaacacattctttccttgcttgcagctgtttgtgccatgtttttcttacttctctggctgctgcttttcaattttgatttcctttgctcattctttaaatattagtgctcctcaggtttccatctcgagcctgttttattttgatgtcacacactctttctgtatatcttcaaggactcatatggctgtgattatctatctgtagatgctttctacatgagttggcttacttcagatttctctcttgagattcagccttgcgcacccagctgacaattgatgtctaactcttttcttttccccaactcaacaggtctaaacctgtctcaaacaaaactcatcaactccatctctttctccatcaaaaccttttggtattcctgttttgcccatcttagtgataggtattactatctgctcactgaactaagctgtgaaactggatgttaatattgactcctcactttttctttccccttcccatatcaaatgcacataagtcttgtcataataacttataaatatctcttagttaatctcttgaagctccaacatcctctttgtgtaatggggaaaattgtacctaccttatgggattgtagtagagatgaaatcagataatatgtctagccactctgtcttttgcctggcatgctgtaagtattcaatacacatacactctgttactgctgccgccctctgcatccagtcttgcctcacatatctctttcctctacatttcttccagtcttgaatacatatatatgtatatatatacacattttattattttattagacttcaagttctgggatacatgtgcagaacatgcaggtttgttacttaggtatacgcgtgacatggtggtttactgcacccatcagccattatctacattaggtatttctcctaatgctatacctcccctagccccgcagcccctgacagaccccagtgtgtgatgttcccctccctgtgtccatgtgttctcattgttcaattcccacttatgagtgagaacatgcggtgtttggttttctgttgctgtgttagtttgctgaggatgatggtttccagcttcatccatgtctctaaaaatgacatgaactcatcctttttttatggctgcatggtattccatggtgtatatgtgccacattttctttatacaatccatcattgatgggcatttgggttggttccaagtctttgctactgtgaaagtgctgcaataaacatatgtgttcatgtgtctttaaagtagagtgatttataatcctttgggtatatacccagtaatgggactgcaaaccatcaattggtatttctggttctagatccttgaggaattgccacactgtctttcccaatggttgaactaatttatactcccaccaacagtgtaaaagctttcccatttctccacatcctctccagcatctgttgttccctgaccttttactgatcgccattctaactggcatgagatggtatatcagtgtggttttgatttgcatttctctaacaatcagtggatgatgagctttttttcatatgtttcttggccaaataaatgtcttcttttgaaaagtgttcttatcctttgcccagtttttggtggggttgtttgtttttgttcttgtaaatttgtttcagttccttatagattctggatattagccctttgtcagatggatagattacgaaattttcacccattctgtaggttgcctgttcactttgatgatagcttcttttgctgtgcagaagctctttagtttaattagatcccatttgtcaattttggcttttgttgccattgcttttggtgttttagtcatgaagtctttgcccatgtctatgtcctgaatggtattgcctaggttttcttctagggtttttatggttttaggtcttatgttcaaatcttcaatttattttcagttaatttttgtataaggtgtaaggaagggatccagtttcagttttctacatagggctagtcagttttcccaacaccatttattaaataggaaattctttccccattgcttgtttttgtgaggtttgtcaaagatcagatggttgtagatgtctggcgttatttctgaggcctctgttctgttccattggtctatatatctgttgtggtaccagtactatgctgtttttgttactgtagccttgtactatagtttgaagtcaggtagcgtgatgcctccagctttgttctttttccttaggtttgtcttggctttatgggctcttgtttggttccatatgaaatttaaagtagttttttccaattctgtgaagaaagtaaatggcagcttgatggggatagcattgaatctataaattacgttgggcagtatggccgttttcatgatattgattcttcctatccatgaacatggaatgtttttcatttgtttgtgtcctctcttattttgttgagcagtggtttgtagttctcctagaagaggtccttcacatcccttttaagctgtattcctaggtattttattctctttgtagcaattgtgaatgggagttcactcacgatttggctctcatctgttattggtgtataggaatgcttgtgattttagcacatcaattctgtatcctgagactgctgagttgcttatcagcctaaggagattttgggctgagacgatggggttttctaaatatacaatcatgtcatctgcaaacgagacaatttgactgcttcttttcctgtttgaatacccttcatttctttctcttgcctgattgccctggccagaacttccagtactatgttgaataggagtggtaatagagggcatccttgtcttgtgctggttttcaaagggactgcttccagcttttgcccattcagtatgatattggctgtgggcttgtcataagcagctcttattattttgagatacatcccatcaatacgtagtttattgagcgtttttagcatgaagtggtgttgaatcttatcaaaagccttttctgcatctattgagataatcatgtggtttttgtcattggttctgtttatgtgatggattacgtttattgatttgcatatgttgaaccagcactgcattccagggatgaaactgacttgatcataatggataagctttttgatgtgctgctggaattggtttgccagtattttattgaggagttttgcatccatgttcatcagggatattgacctgaaattttctttttctgttatgtctttgccaggttttggtatcaggatgatgctgacctcgtaaaatgagttagggaagagtctctctttttctactgtttgggatagtatcagaaggaatggtaccagctcctctgtatccgtgaataccgatacagagctgtgaatccatccagtcctggactttttttgattggtaggctattaattactgcctccatttcagaacttgttattggtctattcagggattaaacttcttcctggtttagtcctgggagggtgtatgtgtccaggaatttacctatttcttctttattttcaagtttatttgcgttgaggtgtttatagtattctctgatggtagtttgaatttctgtgggataagtggtaatttcccctttatcatttttaatatgtccttttgattcttctctcttttcttctttatttgtctagctaacaatctatctattttgttaatcttttcaaaaaaaccagctcctggattcagagattttttgaagggtttttttgtgcctctgtctccttcagttctgctctgatcttagttatttcttgtcttctgccagcttttgaatttgtttgctcttgcttctctagttcttttaattgtgatgttatggtgttgattttagatctttttcgctttctcctgtggatacttaatgctataaatttccttctaaacactgctttagctgtgtcccagagattctggtatgttgtgtctttgttcttaaagaaattacttatttctgcgttaatttcgttattacccagtaatcagtcaggagcaggttgttcagtttccatgtagttgtgtggttttgagtgagtatcttaatcctgagttctaatttgattgcactgagctgggagagacagtttgttatgattaccattcttttgcatttactgaggagtgttttacttccaattatgtggtcaattttagaataagtgcgatgtggtgctgagaagaatgtatattctgttgatttggggtggagagttctgtaaatgtctattaactcagcttggtccagagctgagttcacagacttgaatctttttttttttttttttttgagacagattcttgctctctcccccaggctggattgcagtggcactatctcagctcactgcaacctccatcttccaggttcaagcaattctcctgtctcagcttccgaaatagctgggactacaggcgcccaccaccatgcccagctaatttttgtatttttagtagagacagggtttcaccatattggtcaggctggtcttgaactcttgacatcaggtgatccgcctgccgtggcctcccaaagtgctgagaatacaggcatgagccactgtgcccagccaacttgaatctttaatatgcaaatctgagcatgtcactatcctcacatgacttcccattattgtgaaaataaactctaaactatttgcctggtatttacggcagaagcatctgcccccactcccatatttctccagccttatttctactttttccttcacatttcaccttcagtgctgctttctccaggaaggctttgacagtcccattacttcagagttggctaatacctctgtcttctccaaattcatggagcctacctccacacttaccagactatgctacagttatatatgtcttttttttttttttttgagattcagtctctctctgtcacccaagctggagtgcagtggtgcagtcttggctcactgcaagctccgcctcccgggttcacaccattctcctgcctcagcctcccgagtagctgggactacaggcgcccaccaccaagcccagctaatttttttgtatttttttagtagagacggggtttcaccgtgttaaccaggatggtctcgatctcctgacctcgtgatcctcccaccttggtctcccaaagtgctgggattacaggcgtgagccaccgtgcccggcccctgcagttatatatgccttaatatggactctgcaatagtctgtatggtccatgaggcaaaggactgggtttacctggaaagcctccgctatgcccataactagcataatgtctgacatttaggcgatattcaagaaatatttgttgaatgaatgaaatacttgataaataacttcaacctttttaactgataaatttttaaatgattaattttaaaccaacataaccttctaaattaatattcctttccctcctcatcatcctctaaaaggacacatgaactctctattctgctggtttaagcagatgatctagacatcaacctagatgcatcatttaatttaatttaaggtaaaccagcaattccattttttgttgccgacaatgaattaaaaaaaaaaaaacagagagataaggcctgagaagcacccattgtatttagcaatagggaggttccagtgaccttgtatagaataatttcaaggaagtggtgggaatagaagccagaccacaatgggttgaggaatgactgagaggtgaggaaatggaataggtattcatgcatttccatgggtccaattacacacataaaaaacctaaaagaatagtacattaaaatttaacccatgggccatctaaatagaaggaaataaagtttttattacttttagtttatgaactttccaggaatttttttcttctcatttagcctgggattttctctgtagcccattactatattctttacggcaacttagaaacactgatatcaggattagtttatttgtagcatcagggccacattaaactgattctaggaaagtttcatagaatgagaagaaaaacttatggctggaatatttgcctcctcagaggtcttggtagatgattcccaggttattgatttatatttctcagaattatattcaaacacagtgtgctagtttgaaatctcctttcattcaccttctttccttaatctacaaaattagcaattgtttataaattgagtgtcttatgtgtccaaggacttattaggggttgaagaagatataaaaaggaagaagtccattctctgtagatttttatgatcttattgaaggaatatccatttcatgagaagataataatacatggaagcacacattaagtgctaaacaaatagataacagggatgtctggagtctggagaagggatgggtatagcaatattaggcagtgaagatggattccaaatgggccttgcaggacagacaggagttgggtagtttgagaggagatgtatcatattctaggcaggggtcatgggagatgcaaagtcacagtgaagttacaatataaggctgattataactggttaggatagagtattcatctatccttttacagcatgctgaagggggaaggaatattagagacaggcaagtgaggttcttaagtgttaggactttagactctcggcataaatgtgtacaatttttttgagacagggtctcactgtgtcacccaggctggattgcagtggcacgatcatgactcactgcagccttgacctcctgggctcaagcgatcctcctgctcatccttctgagtaactgggactactggtgtgcaccatcatgcttagctaatttttaattatttttgtcattcaagctggttttgaactcctgggcttaagtgatcctcctgccttggtgtctcaaagtgctaggattacaagtgtgagccaccatgccaggccagaaatgtgtaattttgaaggtttttgtttttgtttttttggtatgtgtgtgtgcaagggttgcagtttgggcagaagaaggacatgctgatgggtgatgcatcagtagaaacaaccttgtggagttgtaggataaccaggatgagaagggtattggatacgattaggttagaagctcctagctcctcagtgaagtggtacataagggctctctctgctggtgtgtcatttttatctgctagattctcaaacattttggtctcaggacccccttgtactcttaaaaattattgagaataccaaagagccttaatatatgtgatttatatctattaatacttaccattatagaaattaatgttaagaaaacttgaaaatatttaatttattaaacataacaataaacccattccatgctaattttattttttatttttttgagacggagtcttgctctgtcgcccaggctggaatgcagtggcgcgatctcggctcactgcaagctctgcctcctgggtgcaccccattctcagacctcagcctcccgagtagctgggactacaggcgcccgccacgaggcctggctaattttttgtagttttagtagagacggggtttcaccgtgttagccaggatggtctcgatctcctgaccttgtgatctgcccgcctcggcctcccaaagtgctgggattacaggcgtgagccaccgcacccggccaaggtgcactcatttcttgtggcaactccccagccctgagttgaagaagcagcatgccctccacactttatcctcagaaggactgagtgggaaacccttggtgtacatcaaggaaacaaaggcttttgatcttggcaaaatgggataatgcccatgggattccctagcagatgatgggaagtagggtggcctctgccccctgaagacatgtcaggggtgggaagcgaaggatctagattgggtgtctgtgctctgacaccacaccacacttttaggagtctaaaagaacaccttctcttttcaagacaagacctcgaaaagctgaatatggaatggggtagggctgggaaacttgtccatcactatgacaaagacagaaaatgttgtaaacctcttttaaaaagattgttgtagctttcaacattctttctttttctttagtaaaatctctaagaattccagcctgccttttgtttaggggaacctggaaaaagagattttaaacaaacaaaacatgacttaattttatttttcttaaaagaaactgaaatacaagtacattgttaaaaactttggcagatataaagaagcagaaaggaaaaaaaataaaaccacacataattttaccactcagagataaacactgttaacatttggagcacagatttatccttatttatagcagcattctctatatattgtttcataataatctttttatccctagcagtgcatcataaaacaaggcatctttatcctttaaattgtatattcaggaaaagcgttcttcatcttcccttcaaaaagagttttgagagtgaacgtaagtgtgtgtgtatgtatgtgtatgcatgtgagtgtgtgtgtatatgagtgtgagtgtgcatgtatgtgagagtgcatgtgtgttggtggcatcagtgccagagtgacttcagtaagaagtgtaagaaaacctgaggaaaaatggaaaaattaatcttggggaaacagagttggggtcacttgactggccacctcttaaacctagagattatttttatagagtgttcttggcttaaaccttagaaaactgtcttttatcttgatagaataataatgagtaaactttgaagaggactttaaagaggggaaaacttcaagagaaggtggagagagagattcagcgtgtgtatatatgtatacatatatatatgtatatataagtatgtatgtatatatcagggagatttggaagtgaaacttgagtgccttgtaattgaggcagtttcattattgcaggaagaacaaatctggaagcaatttcctcagtcactcgtgctttgaatgttcctgctgtgagtgtggaacatgtaagtcaccaattccattgttcagtgagccctaaaaggataaattaatgggacggttcacttgtttcaagggtcagaagtggtctcccaattgttaaattcaaactaccattttaaatgtatgtatttcaattgctctcttgggatctttggccagttgccatattcaaaacacttttaggtatcccaatgattatttaatgggaaagaaacctctggaatcctggaattcatatctactttagtatttattaagatgattactaatattgctatgtacctggcatgcagtagtgctcggtaaatatgtgttgaatgtatgaatgagtaaataaatgaatgaatctctcacttgtcttcacagcatttttggagccaactgcaaaaatggtttaagttcatagctgcaaactaaacaaaattatgaaaaagcaaaagaaatgaagtgcagaaagcgaagtatacctaaaattctcactctggtgagaaaagttggctgatgtttgaactgtaggatttttttttttctttcttgagccggagtcttggtttgtcaccaggctggagtgtagtggcactatctcggctcactgcagcctccgccttctgggttcaagcgattctcctgcctcagccttccgagtagctgggattacaggcatgcaccaacacgctcaggtaatttttatatttttagtatagacggggtttcaccatgttggccaggatggtcttgatctcttgacctcatgatctgcccgcctcggcctcccaaagtgctgggattacaggtgtgagccactgcagctggccggacttttttatttgtataaatgtaagtacaagggcagttttgttacatgaatatattgggtagtggtgaaatctgggcttttagtgtagccatcacctgaataatacatattgtgtccattaagtaatttcttattgtagggttatttttgaagtctgtctctgagtgggatcctaaatatggtttaacagttaatttaattgtgtgtttcaactcactattaggggcaacaaagtgcattctctgccagggtctcaatgattctttcattgaatccttctcagtgttggaccaagacatagcagccagaatactggcttacaagtcaaaaggcatgagaacacatatatctgaattctgtctttaacacttttacattgtttaatcttgtaccgttagaaatttacctttctagacaggatttcttcatccaaatttaacctaaaatctatttaagtggttgattaaagaggttatacgtgttaagcatatattatggtttgctattactgtagtccttatatgcttcccagaactcttatgataactattgcttataaaatttattcaccaactaattgcatactcatttgcgttactgatctctccattaatttttttgtgtatcatgtcttatttccccaagaatcagatgcatcaaaataacaaacttagcacatgtatctcctcctctaggaagccttccctgacctcattcctttaatcacatgatatgttgtgcatatttttatttgcttatctgttttatatgtatctcctttctatgctgaatgatgagattgttgaagatgaaaaccatgtcttattctcaacacctactggaatacctgactcagagaaggtgtgagcaacctgttcagttaatgaataaatgaatgagaatgaaggagaagtggaatgggcttctataagagcagaacagatgaagattataggtggattcttattaaacctcttacttgttgcatctctttaaagaacaggagatcgccacttacttggggtgggggaaggatgggtttcatggctttcatcacagctgcatacatggcaaatttcagaaagtagctgtagttcttactgaatagcaacagctgtagcaatcactggcagggcagcgcagggtagaggtgactaaaataaaagaagctagacagagctctttcagacttggattctaaccccagttctgctgcttgctccctctggggctttgtaatggtatttaaagttgattgtcattgagtctaaatgcattacaaaaatctgtgtctccctgcctttacctccacagagagaatacaaccacacctagcactttccttattgggaatgtgagctactcagcctcccacagaatctcaatctattgcaaaacaaaatctgaaaccatttctggggtggcttttgaatgggatgatatttcatttctggtgtgatgtgaaggccttggtataatggtacaggatcagatggtcttactgtattgtattatttaatgggtgccacttgataagacaaccaagcagacaaaacagcctgtgtgtggagaacaggaagaagtgtggaagctttaaagagtggaaaggcttatctttttgttttcctataggttatgatgtagcattcattcactagcttttaaaagtgacttttaaataattactttatgtatccatcagtactcttttatttgtaagagtgaaaaaaaatcaactttaattagcttaagccgaaagggaattcattggcccacataacttaagagtcagggtgcacatcagctttaggtacagcttatccagggtattgtgatggtattgaaaatctgtctttctccacttcttagttagccttctttcacatggcggcagaaatggtttaagatgtccccagactcacagcaggactagtggagaaagagtttttcagtagcacaggtgattataggatccagactgctcctatgcttaccaaaatcacatggaaggcagttcccatggcagtaaggaggtctgttactagatgatgggacaaaaacccaagggttacatgtctttcatcattccaggaaggcaaaaaccacagacatctaccaaatttgactggtctggattgtttcttatgttttgagcttaattcactcgggcttatatactggctctttttcgtgcttttgcacaaatcgtgtatgcattctcaagcctttgttcttctttctatatgctgattctcctgatcagctccactactcccactcagctatgacctcattgcagaagaagccacatccttgtctctggtctctacctttctcagggaaagctcaccaatcatttgcatttggggtcccaggagcattgcaacttgaaatgtctaaaaccaaagttgccaccatcctgccaaatgggcttctcttcctaggttccctaatcacagtgttgcagaactttgttccttagttcagcttatactgggttcttgtcacacgaccagaaaaaattaggcacatagacacattgaagggtgaggagaatggaatttattgggcgaaaaggaaaaaagaaaaaaacgacctctcagcaaagctagcggagttcctgctaacaggcccccatctcacagattggttccaggtcacaaacacaggaactgaagagggcaggctcctgccccttgcacgcacgggaaattcccatggctccatcctattctcccactgctcaggcaggtagagattctccgaggaccctcccttttatctgcctcctgcatctatcaacagcagtagcagcatcctctttctactctcccagcattctatcgtcaatgttgtttttgactatttcctctgcatatcatttctccctcatgtgaactctcatagttctttattattatgttttttgtgaatttataatttcctctctggttttatagaccttcatgtatctaatttatttctgccacagtgatttaagtttgctgatggaaggcagttttacttatttatctttgtactatttccttcctggttgtcatcctccagctttccccactttctacttctcccatcaatattatacctagacttttatggtttgataaatatttgtagaataaaggaaggagttaatgcaatctgtagtataactacatggctactatacttgatattgttaaaaaaccagtgcctaacagcagtcgaagtggtaaaaacagatttcattcaggaaacattgcaataggggtatgttagagttctccagagaaacaaaaccaacaggatatatatatatatattttttctcatatatatattctcatatatatatactctcatatatatattctcatatatatatactctcatatatatattctcatatatatatactctcatatatatattctcatatatatatactctcatatatatattctcatatatatatactctcatatatatattctcatatatatatactctcatatatatattctcatatatatatactctcatatatatattctcatatatatatactctcatatatatattctcatatatatatactctcatatatatattctcatatatatatactctcatatatatattctcatatgtatatatactctcatatatatattctcatatatatatattctcatatatatattctcatatatatatactcatatatatattctcatatatatatactcatatatatattctcatatatatatactcatatatacattctcatatatatatactcatatatatattctcatatatatactcatatataatattctcatatatatactcatatatatattctcatatatatatactcatacatatatacatatatatatacatatatatatacatatatatatatatatatatatgtatatatatatgagagattatgaggaattggctcatgtgattgtggaggctgagaagtcccaggatctgctgtctgcaggctacagattgggaaagccaatgctttaatttagcctgtgtctgaaagcccgagaaccagaggagccagtggtgtaaactctagagggagggttgaagaaactgaaatcaaatgacccagttcaagcagtgaggaaggaaaaaagggacaaattccttcctctgccttttgttctgttcagaccttcaatgggttggactcacactggggagggcaatctacttaacggagtccaccgattcaaatgctaatctcatctggaaccaccctgcagacacctcagaagtaatgtttaacgccctagaaataatgtttaatttgggaagccagtggccagtcaaattgacacaaaattaatgatcacaaggggaaaagagacctcagtatggaacttggctcaactccaaatacaacatggacaagtagggatttacagccaaggaggagcaggggtaggagtggggagggggtcagtgaatggaaaattactaagaggaaacattaagggtaggggggattttggttaaacagacctaacaggattcttgctgaaggcaggaccagggtggtcagacatggagggtgagggaactctctttaaactgagttagaaggtttcttgctaacaccaggtgatgcaggtcctgtaaggatggatgctagggtcgaggcctgggctcagaggagcctgactgcagtttagtcaaggagagaatctttgtcagtattgaagctttcagattcagcatttattataaccagatctcaattgtgtaaaatgctaaggaaggaacttgccctaattccttgagcttccttcatcctctctctgaaccagccccccactttcccataaggacatgtttaggaaagaggcagaaaaacttctgactcataaaaactggtgaggaagaaggaagagcagaagcggaagccaaaatgcacataactatttgctgaaacggttttgagcatactttgcggtctcttttgtaatatatacctagcccctacctataatgctaccttactttggtgtttcacacatacaaggcccatttgaggtcaccctaatgtggcaagagaccagtgaataggagcttaacttcaaacttagagtctttatgaaaaatgtcaacgcgctgaacacgaggacatctgaaaccttaaaaggccacagcaaacatcagggcagcatgcttgagaacagcagtgtcatagatacaagcatgaaaagaagtaaagctgtcataaatgtgaaggagctggcgaaagcacatggagttttattaaggcagatagcattccgtacaatcatcctgaatagttttctgagtagcacttgatgatcctaccctttccgtaatttgtttgttcattgttttggaggtgaaagggtgtgcttgtgagggtgtttgagcctccttgtccatggtataaccggttggttttgttgccctcactcttcaggcgctggactctcatcctgtttgttcccactctgggaggcaccaccctttctaagacaactgctttcttttgtttctggttcaactttgttaagtcaaagtataataaatatcaagattgtttgaagccagaaataggccactgtccaaaattgtgttcattccacttgctggtagatagctattttaaataagtcaggcttgccattaattcagttctgctgcactgttcgtattctgttctcattctcttatcatgaggggagctttgagttttatcatctctacatctctgtgttcttcgtggtgattggacagttgccactctccatgactaccgtgactatccctgaccacctgtccagctaaaatttcaacacaaatgctgcacagctaagctatctgatggtattaattatatatttatttgactgcactgtttctttttttctaattgtatgtaggagggtgtctttaatgatgtacagttggcaattctgacatccttaagggtggtggcattcaagctcgtgactgccattcacagcaagaaatacattttacatcatgatccagtatacatgttcatgttatatatgatgtgtaactaaagtttggttaagcaacacttaccctattatgtgtgatatggtctatagtttctattattttgtattttacttcattaaaaaatgcagactgtgccttagcaagtgggcgtcctgattcaggaatgggttacaatttgagtctgaaaaagaactgcttaacagtcatcaggtattagggagccttagcatgctaattctgaaaagtctttggagattatctataggcatcttcccgttttcctcctattttacagttggaggaatttaaagtccaagtagggtaagtcttccttgcagggaaacagtggtgctctctgtgtgtgctatcatgtgctatcacacctatttattcctggaagcacacagtgtccagttgaaccacaagggctgtctactttttgaatctagcaattatgcttctggatgccttcctggtgatgaataaactgttcacactttcccttccccaattaaatcttgaggtattttctccctccattagtttattatacatcattctgagctaaagggaagactgttaacagggcattgagtgtggtgtatcctcttctatggatggcatgcagctatcattaatcataaactcaaaacagtgggttgaataaggaacaattttaggtacatacttagacattaaaaaaatctaaatgtgcattttctgtaaggtagttgtaatcttagcgttggacaactgcatagatcttggtgtatttgattatttgatgttttttcatttttcctttataaacagtagtgatctccttgtaacaaaatatgacattttaaatttcattgtttctgtagtaaagggaattacagcatcttatggtcaaacaattaacatcaactttgagttattgataccattcatagtgtattagtcagctcaggctgccataacaaaataccaaagcctaggtggcttaagcaacagaaatttattttctcatagttggagacttgaagtccagaccaaggtgccagaatggttgctgtctgtgagggctctctccttgggtcacagagagcattttctcgcttcctcatatagcagagaaagagcaagtgagcaggctctttgatgtctctttttataagtgcactaatcccactggaccagggccccaacttcatgaactcatctaaacttaattacctctcaaaggccccatctccaaataccatcacactggggattagggcttcaacatgtgaatctggggagacataattcagatcatagtacatagctaaggtcttattggggtttaagcattggctgaagcatgcaaataacttgcctaaattacgtttattaaagacagactcttccatttgagtgaatggatatttttcacactataattcttatgacattcagtagcatttattttatatttttcttaataatgcaagtactgtatatggaagagcttacagttaaaatgtgagaacaacattatacctttaaaaaattatttttgcagtttttttcctaatgtagattctagtccttgttaatagttaatgaatttctaaacagcccagcactattttcaaaacttaatatagaaaagttacccaacgtcattgagaataatgcatattttaatgaaaaacagtttgtgcaaaagacatattttaaaacaactttttatatttatatttattgcagtgtagagaagagaggaatttcttagcatgaaactgtagggagccaggtatttgtctacaagaaatgctatagagagccatgccagtgacacacacaaaatatccattcaaactgaagaaaagtaaactaagagggggtactgacaataaaaaattgttttaaaaccctttgtttgaatggtgttggtgcacccctattttaaataaagtccttagatatgcccaaaccaattcttatttattttctgctgtaggaaagctgttgattaagaagggatttttttttttctatttttcttgtttctaggtttaaactggtgtgggctgttttacaactttaggggcctttcaatttctgtggtgggcttttgtataaagagtgctgtgcatctagatgaaatagtctgtgtctctttatagcatctttgcttatgtgcttttacacattattatcacattttttttttgtttattctatttcagtgtttaactgctgaagagatcttttcccttcatggcttttcaaatgctacccaaataaccagctccaaattctctgtcatctgtccagcagtcttacagcaattgaactttcacccatgtgaggatcggcccaagcacaaaacaagaccaagtcattcagaaggtatattagaagcattttttctcttttatttgaaaagtctatgaaccattgtgaaatgaagttaatatgcctctttttctgctttattgcttttaattaatctacatagaacttcttcgaataatacttatattttgaaagtatttggaataagaagaattataactcatttaagcttcataagttatgctcttctctttgttgaatcaaaattacatttagtacacttaaaaactttataaaatccagttcttgattttaaacaatatatattttatgctgtgcatattggattgcattttctttggcttataattgatcatttcatttccattatcttttgcttaccatattattttaaagcttgtcagtttatctgcagttaccaatgaagagataagagaactagcatgcttctagattaaattttcagggaccaaattattagttttaattttcataggtgaaagaaaataccagagactattttaagtgactataatggtatttccatgaatatgtactttaacggtatgatctgatgcaaagaaattttaaaccataataaaatatatgtatgcttaatatacagctcacatgcttaaatgtgtagaagggtcactttcaccaatgagataaaccaattgttcagggagtctgtttgaaaattatgttggaattttaaagtttcgttcatttgttcattaagcaaatatttattgaacgacataccaagtattgttctgtgcactaaggagtcaatggtaaacaagaagaataattatctgtctttttagggcttacagtgtagtggagaagatttaaacaagcaaatttaaacaagcaaataaacaacatagtttcagagtgaaaggtgctatgaagaaaataaaatattagtaggtgagggatagaaggtgatagtgggtgagtgtcatcttagatagatcaaggaagccctctctgatgaggtatcatctgagcagaaggagagggccacagcaaggtcgtctctagtgaagagcattcttgattgagggcacagccaacatagcttggcaatgagcttggcatgagtgaggagcagcaagaggctcctatgtgtctggagcctagtgagttggtggggaaggtagaaggatatatgtcctggcgggagatggagaccaggtgaggaagccttgcgggaggtggtaaattgattgggttttattctgaatgtagtgtgaagtcactgtaccattctaaacaggggaatgctgtgatctcattcaaatctgttaaaagggcattccacctgcctacaatctgaagaacagattgtaatggggcaagagtagaagcagggtgattggtcaggaagcgattgccaggagctgatgccaggatgatggggacttggactaaagtgggggaagtagaagtggggagaagcagtagattcgggatgagtcctggagatcatgctaaatggtttgccctggattgattgtgggagagggaacaatgagtcaagtcttgagccagagaaaccggagagatcgttataccatttcccgggatggagaagactgggaagagccctttattgtagaggaagggagtggtgaggataaagaatataatttttggcgtggttgctttgagacattgacatacacaggtagacagggaggtccagtaggcaaaggcacacagacatttggagaggagattgctttcagaggagaggtcaagactggggatttgccagtctagagatgatatttaaagacactggggctaggcacggtgactcatccctgtaatcccagcactttgggaggccaaggcagaggattgcttgaggccaggagttcaacaccagcctgggaaacatagtgagaccccatcacaacaaaagttaaaagaattagctgacatggtggcatgcacctgtaggcctagctacttgggaggctgaggcaggaggatcacttgaacataggaggtcaaggctgcagtgacctatgattaccccactgtactccagcctgggtggcagagggagacctcatctcaaaaaaataaaaataaagatgctgttctgagtgagctcatctgacaggagtatagatagataaagagagtaaagatagagaagaaaagggaagacttaacaaagaaagtgcctgttttcatttccggattcctttgtgcatgtacacttcagtctccctctatatgaataaaagaaataacaacaacaatgacaaaaataacaatgatgatagccaattcttttgtggtacttactatatgacaggcactctttgaagtactttacatattcatatattaatttcatgcaactatatgatgtagacactactattcccattttacagccaagaaaacaaaggtacagggagtttaaagtcatttgctcaaagttacacaacttgcatgtggtagagccagattcagcccaggttgtcttggcttcagaacccatgttctcattgatattctgtatttatatatacaaagcatagaaatcaccaagtatcatttatcaatataatttgcaattttgtgaataacagtaatttcaattttgaaatattagtaattttgaattgctaattgttcaagcaaatatttttgctagagtatatttatatttctacaagcctgtttaatacagtttgcactttacattaaaaagtaaattcagcaaacgctttaggatactacccttgactaatagtattgcacagtaaaagcacagactctgaagccagtttacctgggctcaaatcccagctctgtaattttccagctatgttgagaacatgactttaaccttttcctgcctcagcttcctcatctaaaatagtacctttcttatgggcttgctgtaaagattaaatgacttaatatttgtaaagtacttcgaacattattcagtacctaggtgctgtggtaggcctgttagttaggtctgttaaataactacatctaacgtgcataactctaggtacaggaagtgaggtttcagaaaaagcaaatactctactctgtgcaggttacttacttatattcaaaagtaattttttaaccccagttgctctgtgcaagttaattactcatattcaaaagtaatttttaaaccccagttgactaggttactctgtttcaggaaccaggagttgagaactgggaagtcagaagcagggtgtgagaggtagaattctagggacaacactacaaagtcataaaatggaaaagtcagcaattctaagttatgggatcaccaaatattcagacagataacccaataaaaagagaaatgcctcttagggtgcatattgtcttaggaattgaaatgaggctggagtggagtgggatcggggggagaagatatggaaatgtttccaggggaatttagggaaactagtagagtgcttgttactactcatctaagatgtttaacttggcactctattgcctttttgatgtgatatcttgattgttttattttagtgcagctgtatgattatttaatatctctatgggtcagttactttaatagtacctttatagaattgttgggagtatcaaatgagttaatatacgtaagtgcctagaacaatgcctggcacagaggaagaagaatgtctttgttcttatacatgtgttcataggttcaccacattccctggcccctgtgttatcctattgtttttctcactaagaaaaacattttaaaataattaaatgcactggatttttcatataacttttcacttaatgaagagtcaagtctttagctcatccaaagcaataaaaaatcaacataaaaacaatccaaatgatacaaaaatttgaatacatttatgttgacatttcagtgggtagacagtaaaatttctcagaggcctcacattttatttttgaaagtatttcatgtgctttataaaatgatattgatgagtacagtaaactgatgataagttaaattctctaggagagaaattaattgcattttagtaataatttaatggtctgaaattgcctcactttttgatgaagttgcagaatcatatttaattcatatagtagataaaataaagaatattaattgaagcatccttggagatcatattgtccaactctgtaatacaactagtgatgtaagtccaagttccagagaggttaagtggcttcttgtaggtgtcgtacctaaggtgaaatgagagctcctgattcttagtttgttcttcttttcactgagtaacagtgaattaaatgaactaacatttatatcatggtctacttactaattttttaaacataattgtaatcaacatttattaaaggcttgctatattccagggacagcattaactggttttattttattcttgtaataactctatgaaataggagctattttaatctgcattttaaatatgagaaaactgaaacttagggaagtcaaggaaccaacctatgatgccagtgaggggatgagctgggatttgaacacaaatcctctggctccagagttcacactgttaaacaccattctatacagtttcacagttaaatggggccaggcaaaaattgaagcctgggctgtatgcaggtctgcaaaatgggtatcataatagaaccatatttcctcactattaaaatgggaaaaatagcagcacctatctcatagggttgttgtgagaattaaatgagttaaaataggtaaagttcttagaagaatcttacacagtggacagtcaataaatgtaaactatcctgactgtatttctttgaaatctattaaaatctttcagggttcacttataaggagactggtccctctctgaaacagatcgtttgagaaagtcccacgtatatatggagatgtccaaggaatagattcatactaatgtatacttttggtgcttcagttaagtggaaagtgcttcagttgaatggaaactccagacatttttttctgaatgatgttctaacaatacaagaaggggaagctatgcagtgtgcttagaatgtgatgaattacactcccaccatcccccaagttgtgctgataaatgtgcaagggcaaagaaagttagaaagttggataagcagatcgattggtatttctttttgacagagttctgctgcaccttgaaatggggaatttatcaattcattcagcaaggaatgtgtgctttttcgtggacaattttctaggcactgaggatgaataaaacatagcccttctcattgagaatcacacagtttatatgatgtaggcaaatatatcagtgataaaattactgtagcacacaagaagtggtaagtgaacaaagagtaatgggaatcctgaccagccagggagtactgcctggagagcagggaagcttcatagaggagatctttgtgttggcttggaaggccacgtatgactttcttaggcaaggaagataggaaagtgttttcagacagagaaccacagtgtaaaggtaaagctcggttgggaaaacatagtgtttgggtaaaggccatgttgagaagggggtaaataacactggagaggctgtgcaagggtcagtttatgaggggcgatttcaaatgggggcatgagatgatcacttttgtgatttagtataagtctgtaggccatgtcagctagtaggaggggcaccagatcgataactgtcatgttatataagatgagggagtgagaggtgatgagggtctgacttcaagaccactggcaatgaggatggagaggctagaggtgagagatgcctgaagcagaactggtagggtttgatcaccagttgtctatggaattaattggtggaaagtgaaaaactgaaattgatcctactgttcctgttatttatgtaggtagtgaacaagggtaatggaacaggtgtttgcagggaagctgatgagtttaacatgtgcatgtggctttgcttctattggcacttaacaatttctttgccttttaattttagttttcaacatgtatatatcttgtctacccaatgagattataaatatttgttgaatgaatgaaggcatgtaggctagtgatggatagaagtatgtttgtgttaagagaaattccatgtagatctaccacgataaaaggtgtggaattgagaactctctccaagtggaatgtctgtggggactagtagtattgtttaaggtgataaggtaataaatgggaatgaagtgggctgttaggtgaagttgtagggcatggccaggacctgcaactgataggaaagtgtctggagaagatgcagtcgtcatggtcagtgctgtgatgattctcggggttacatagtaccatttataatctgaccttttcatttggtacttagcacaggtgactttgtatcactctgtgtgtgtgtttgcacttgtgtgtgtttgtgtgtgtgtggtggcaggagccatggtttggtccacgtcatctaggctgaatgaacatttactaagtttgtttatttgtacatagaaattctagactaacaataattatagtgaacaatctcgtgttaataaagtatgtataattcaggaaaacatttttacagttttattgagtcctttgggcttttgaaaaatgagattatctctaaaggaataataaagcatatgctaaaaaatgtgggcctgggagccagactgtccaggttcaaaatccagctttctatctgcgtgattctggcaggttacttgaattccatctgctttggtttccccaactgtatgaaggaggtagtagtatttctcttacagggttttgtgaggttcaaataagttgacatatgttgatcacttagcacagggcctggcacatggcaaatgctccctgagctgtaggtgttactagtgtactccactgacagtgccatggagaaaagtggcccaccatttaaacatgctttctggatattttaaagaagtggctatgcagaggcagctttctcctctgtcacactgtactttgtgtacagtgtgtggggccagaggcaaagtcacatgttgcacagccctgaggccacgttgtatctcagcctgcacccacacataggtgactgtcctgggtatgtttcacttgtgttcccattttgtccttacaccagcccctttaagatagagagagggaaattgaggcccaaaggcaataggtcacacatgccattagctatagagcttaggatagtattcattcattttattctaagcaatacttattgtgtgcctactgggtgccaggccctgggtctccagagatgaaagatgcaccacctttttctgtcaccagcatctcttctgtatggaatatttttgcctaatttgtgtctcacagggtgggttatgtaatgcagctgctccctcctgccccatgtgctcacttcctgagtgcttattgcatcagactgactttgattcccaggaggctccagctggggacctgaggtgctgctggtgccaccttctctgaggagatgctgtcctcaggagtctgaagacaaatgattgtgacaaactcagtgttagcagctatggtcaccttgaagctagctcactgtgacccatctccatccctgccctcccacccatcaccccatacctttgtcctgaggctcacactgcccctgttttttcttttttttcaaaatgctgttttaatctattccttgagccatagatgaaactaggtggcttggagcctgtggatctcagattgtttgtcgctgttcgctgttctagatgttctccaatttccctgcaagctgtaaaactcattaatcccataatgatgatttagggctgattaaaacataaacagtattactattaatgcttgctatgccatatttgtattctcagttttctatatacttttcattgagtagattttgttcttttaaagaagatatgtgtcttaagcttttaaagacacttttaagcttaatgtacaggaaaacatcatttggttccttgctctgattaatttctactctcttttccctctgacccacagtttggggatatggattcctgtcagtgacgattattaatctggcatctctcctcggattgattttgactccactgataaagaaatcttatttcccaaagattttgaccttttttgtggggctggctattgggactcttttttcaaatgcaattttccaacttattccagaggtaaggatgttggctatttgtttctgtgaataattgtttcttttgaacgttttagcactttgtatgtttttagcctccataattcttacagcgttttatggtctagtttatagtgtcttggataagagaaagctgaatcacagcaattgtaaaggcttgtcccaagctgcagtggatatcactatcagagacaaaattaatattctaggaggccagccactaggacgtgctcagacagctctgggacacctcagaaggccttaaaactttattctgccttgcacttggcaaatttaatttttccacacactgtttcattatttatttatttatttatttttctaaagagcatgcaatgtcaactgtactgcaaatgtcaaatgtaaatttataatgtatttaacatataccactaaattccctcatatatttactacagttataagtgactagagagtaaatgagagcatggttgacaaaccttttcattttttccaactgtggaaaaaatatcaattgaggactaataaataaatagcaacttattttttttctttgataaaatgtgttattgatctatcttgactatagtgcacactattcaatttatttcaaatctgtgttgtgcccatataaggaagagaaatggaggaagggaaataaatgaaaggaaaagagaggcaatgttgaagaggaaggaaaggagaaagagactttcatagaagggatccacaaaggggaactagagaaatatatgtatacatggactgtatctgccacccacaatgcacacacacagggagagacaaaccccatacagagagaaaatattaatagtatttcagggagtaccacccttatctcgtaatttttagaaaattataactaaagcttcctttaatttttcaagctatacattgaaagtgggtatataactttttagagttatagatttattatcattatttgatctaggacctaagataatatctatttcacagcctcaattgtagagataaaaaatattaaaatttagggtggttaaataatttgattatagccttacaatcagctagtaacaaagctaggatgacaatacagattttctgatttaaaagagtattatatacataatacatttaatatgatataatatatgtatttattatctcatctgctttatgggtcaaagtaaattaaacaaactaatactgtatgtggactaaagactctacattgatgatgttaaggttttctattttcttgaagtttaacaatataaagaatctgtctttgtaataatctctcaaattttcatagagttttttgtagcaaaatgattttccttttcttatttcactttattttcataacctcaatgttaggtaaatggaacatttatatttatatagccattttgcattgtataaacaggcacaaagaagttattcaaatgaggatgcggccatgatgtctccccagaggcaaacataggacaagaacccagacatcttctattctgcttcagaggggagatttacaatgtgtggaatggtgtaaagttgtggcttttcacccattagtctctcctctgattctatttatttgaagtttatgtgtcttgtctgttaggaacatcttgactctttataacttcaaactctaactccagttctttgtcctttaaagaaagaattattccattcttattgctgtgtgtgtgtgaaagagagagagagagtggtggcaattttaaatcttctttttgcttttattcttgggcctaggccttgatttatttacctttttaggatttatcacagttctgtaggtataagaggatttctcttgggaaaacagtaatccaagtggcctgccatatttgttttaaaagtttgattctggatatcatggactaatatattacttttagagacagtaggtaatcaatatctcatttatcttcattatctagacctaatatcgtattctaaagatgagaatcagagctgctgctttactgctaaaagtttactctttcaaggcaaatattgctgtaggtgttataggtgggaaactgtaagattctctggtggctttatttaatgagacttctagttgtaaggtttttgtgccatctcatacagttttgtcattcaaatttcaaagtttttgttttgtgatttttggcagctaagtttccaatattacttggatgtgaagagagacttagaacattggtgagaattgcatactggtattattttccagaaatcaagttaaatttcttggttttacttgaattgcccttttttctcccttaggcatttggatttgatcccaaagtcgacagttatgttgagaaggcagttgctgtgtttggtggattttacctacttttcttttttgaaagaatgctaaagatgttattaaagacatatggtcaggtaaatggactttatttaaaacatccaatattttaccccctaaagctactttatataggcaaataaagacagaaattttatttttagaattatgagaatggtccagttattaggcttgtgagtttaaggagaacaaagagtcaatatattgacaagtataagataaatacttgattcatgttgtaaaatttggaggttatttttgttttttttcaagtatcagcaatttaatattgaataacagatgtgcataattcatattctattcatattcatcaaaataagagtgtatacgtgttctaacacgaacaaacagtaacagcagaatctaataaatgaaaatacatgtaaaaaagagaaattttatatatctaaaaatacttctttacacatagaatagacatacaattttcctcttataaataaaaagcagtaaactctatttccttgtctgtatgaatcatcttttttcttcttataatctctttggtttttgttcccatatagaatggtcatacccactttggaaatgataactttggtcctcaagaaaaaactcatcaacctaaagcattacctgccatcaatggtgtgacatgctatgcaaatcctgctgtcacagaagctaatggacatatccattttgataatgtcagtgtggtatctctacaggtatatgttaattccatttttccttcattatactgcattctttatactgtgtaaacatgactgtttatgcagctaagtcagtttttgtacatttatgtatgtcagacttattcctatatatgtggggtaactggaatgtaagtctgcattgtttttccaccttccctgtatatgtttactctaaacaagtgagttaagaaagaaattgtggatcactgttctggacttcattattctctaagattatttactatatgagagtctctcaattgcatttatacaatattatatagcaaaatttattcagagcatttattttacaattctttgaagatccagaatcaaataatcctttgattgattttgaaattgcaagaagatttgcaaattattaaaattgtttttattaattgtctgacttataatttatatttatatccacatcttctaaataatattaataggcacaatttcttgagcacgtatcatataccaggtaatatgcttagcacttaattatttgatctcatttactttttataacaactactcagtgtagggattatttcttatgtattagaactatattggtttcaagtgatagaaatcaaacaaaattatatatgcacaaaggacaacttactggaaagatactagatgactaatagaacagccaagctacaggaaaaacaagaacctaggaaacattagaacccctaggactctccctccttctctttcctgtctcttagtatcattcttttctttcactgtaggctatcttttccataagtgggatacatagccactagcagttcctgaggtttgtcttataatttcagctactagaaggaaattgacctgactctttcagtcctaaatccaaaatctctggcaagtgtcttcctggttcagcttgaattagatgatcacttctagactaatctaagtgcttagagggctgggcccctttaatggtatcaagggaatgtggatggagtagaggagtggttatcaaaaagggatgctgaaaagatagtatcactggtgtctacaacaattctcatttgacagatgaagaaagtggaactttagatgttaaataacccctccaggtttactcagctagtgaatggcagatccacaagctatatagttaaacatgatataaaagtgaacagctaaaaacaaaataaaaaggaaagccagttaaggggaaaaaaagcaaaaaaaatagagcaatctggaagagattattatggcaaatacctgagtttccttctggaaagaaaacatgattggtcatatgcttctctccacctgattaaggaaaatctcaagtgtatttgaagagccagttctgtgttagcactcagctaagaggaaattattttttgcagtgtaatgaatgatgctttcagccaagagtttgcaaagaatctggaaatgttcaagtatataatttcttacaataataattacaattaacattcattaaatgctcaaggactatgcctagaacgttagatgaattacttcatttgatcttcctaataacctagggggcaagtgctgttgtaattaggagagtatgacttagagaggttaaatagcaaacccaaagatgctcagttcctaatggcaaagcttggattagtaccaaggctgccttataccgaagcctgtgttcttatatactttgctggactgccttccttatgttgctgctctactgtaagcaagatgacaacatcaactgttaaatatttattttttgtagtggggaaaaataatttgacccaaggatattgctttctgaggatatattatttaatgcgaggcacagcagagaaagcctaaagaatagtagttaaaacccttccttataccatgtgtctaaattctagttgccttacacaagcttttggcaaatactggattatagtgagattgtggttgaactctgacaagtcattcaagaggtgccagtcagctatattgctaatttaaacattgattaataattctttagataccagatggcagagggataatctgccatgaaatttggagcctaacttgaattcttgctctgatggaagattttcctgtatctttccagcgttaacaagataactttaggcagggctacacttctacagagaaggagctttgaacctggtccaaccttgaacaagttctcccctgggatcctcaagtcctgtaacacaaagcacggaagagatacagtttgagatttaaaatatttaaagggctgatcacctccttgaccatactagaaactcagtgtgacctctcctgatttcaggaaagttccttctgatgaacctactaggataaactagctgctaaatgtgccttgagtatcagaatgagctgataggcatatttatatttagaaaggaggatggctgtcaaagccttcagcttttgtgagaggctaaattatttttttaaatcataattaacaaataagtttaacttctccaaagttatattttagttaaagatttaaggctcctgatttaggattagctatgggcagaagacatgtttgcagtaaatctaagcaccatgacaaagatgaggccctcgacatgatcctgttttacataattttgaaataaaatcagaaggctgtttttattccacttatgacagtaatgctttcatttacttattcaataaacatttattgagttcctgttcattgtcctaggcactggaaattcagaagcaaattcttgaggagcttacagtttattcaatggaaacataaaatatagaaatgagcaaaacaagaaaatatcatatagtaataacctaccttgatgaaactaaagcatggtgatgtgagagtgatgtgtgggagcttcttttgattgactgttcagaaaaggtccctcaaggtgtcagtagggaattgtataatgagaaagaaccagtcatgcaaatatcggggaagaaaatatgctaaagactttgagaataatcaaacaggtcacacacaagggacctggaagctgaatggtagtggacttccccacatcaatgctggagagcagtggcacaattccttcaatattctgaatgaaaacaactgtggaattataaacctaggtaaactacctatctagtgagagggaataatggaactaagattctggaaatacacttccaggaataagaaggcagctgaagaaagaagagaaggtgcgtgccagggtgacagccctgcaccaggccttgagataatagttttgacgttaatttcttatggggactattttctcgctattttggttgaaggtatagtctcaaataaatagacatttaaacaaattgagcaacagactgcaattttcagttttgtttacattgcacaaaaaatcaaaagaaatgaaatttaagaaataagtaggtctggatattgctttaagagagtaagtattacaatataagtgatagtgattttaataataaaattaaaatactttctaatattttatattataaaaataatctaacctaggtgaccccattaaaaggattgaacatgataatataactcagggttcaatttgagttacaagtatggatttaagaattttgttgacaatcccggctgtcactgcttcaacaaagtttttccaaattgaaaataataaggaactctctaaaaattacagtgagttaagaaaggtggtctaattggcattactgtcaatagaatgtaaattatgtgaaaatctagattataaaagcataatttttgatcttgctgaaatgtagaaagaacaaagacatgttatagaatacttaaactgtatgacttaggaatgtctttattattcatccaagcaattctggctcattacagaatactcagctaagcaataatatttaaatttagaagtctctggtgttttatctgtgtttagtcatataaaaatcatagttttacacatatgtttttattttgttttcatggaagcatatttatcacagtgaaataatagaagatattaacatttaacagttagcttgattataacttttaaatatttagacgaaatgatttgagagttccttaatacctttgctccaggcctactaagtgtgaggcacaacagtctatgtggcatgcgtgtgggcacgtgcatgctttttggggaaaagtgggggtcacagaggggtaaaaaggaagatgtaggaaaaagaggggtgcacaagatgctatttccccagttattcagttattgttactaggtaatgtgtcacatgtcaccttgtgacatgctttgtgtttttctcttcgacgttcctgtgtagccaagtgtggagtcatttcactatctctgcagccgggtggggctccccagcccagacacagccttggtgtttgttggatgttgattgctgaggaatgtttggtactttggggagggtgtcagctcttcaaggccactagagggaccctggagctcgttcctccagcaatctgtcatcagtctctctttttatgaaatttcctgtgctttcatttaagaatagatactattaaatataaagtgatttttagaagttgattattgtgaattttatgtgtaaagttgaggtgcaataaaatagaatttagctgcaaagtgtggagatgttagggagattttctttgttgatgactgatatgaagtgacactctatgaatagaatgctaacatttttgaggtggttgggcctccatgagagtttaaatacacataattcattcaacaagtatttttccagtacttaacatatacttggcattattctaagtgctggcacatagggcacagtggagaggagatgaggacccagagcagttttcaagaagtaacagatgaggtgagacagcagagttcacagattccaaactttccacccttccataacataactgaaatattacacattttgcacagaaaaatggaaagcactctttttttttttttaagtatgaaatacaaaaaaaactgactggaagttctgtgtgtacatatatgcatggggcttgtctaccagtcttttgggtggtgtgtttttctccattcttgcctggcggtgggaagaagggtagaatattactggctatcacttgggaagtggagtgggaggagaaggggactggggcactaagaatatttgacataacacccctttctttagtactgtacttcccaactgtcttcagtttgctttgtgtctttgaattgagggtctctctagttcactttccccaggggtagatctccagtcatcatttggggtggctgccttgccacattggcttgggaggaaggacttgaggttctacttgttccctaaatagacttgcagccacttctcttatgtttagttccggtctttgccctctgccttcagaagtacttggtgcctctaatccctgaacttttttgaggttctgggtcctgcatcactttgcttcttgttgactttctttgtgaagtcagtcagaacttgccttcctctttccatcttccaaaatacaaatctcaatgctgtcatgttgtctctctttcctcctgtccttgcagttttatgtctttattcctttataaggacatagcttcaagagggcatttcaggatggactagagataaatatgtatatctggtctgcactatttcactaaaagaccatttactattttaaatcatatagttcttgaacatcacaagatttaaaaacagaaattagttaatttcccctataataacaattaattaaaatagaaaactatacaaataataaaatgacataagaaatgatttccactgatcttgattgactggtacttacataaaaacagtaactagaggcagatgatatagccaatcatgaggagaaattctgggttgtctttgctgttagtggaatttctctctcactgggtctatctcagagcatccctgccctggacaggtcattttatctggctttactctatgtgttgctaaggtcatgaaaattggtacctgaatccactgaatttagcctactttcactgatatgaagtatacttttattcatgaaaaactgttctaaagttttttttttattactccacaaaattcttatttcttattttcttactttaacaaggagactgagatgatgatttggaatgtgtgaactctgctgtctcacctcattacttctgttacttcttaaaaaaactactctgggtcctcatcttctctccactgtcccctttgtgccagaactggtgtcctttctcctttttaaggccagttcctctaaatattctcatctttcctgtggcctcttccagttttgttttgttttgttgttttaggacagggtctcactccataacccaggctggagtgcagggcttaatcagagctcactgaaatctcaaactccttagcctcaagggatcctcccacctcagcctcccaagtagctgagactgcaggcacatgccaccatgcctggctaactaaattttttttgtgtagaaatggggtcttgctatgttgcccaggctgatcttgaactccaggtctcaagtgatcttactgccttagcctcccaaagtattgggattacaggtgtgagccaccacatctggcctgttttcatttatctttcctgaatctctccttttcccgtgtctacaaacaagttccatcttttctacctcaaggtgttatttttttcctcaatctgctactcccaagttttctcaaaccttctttcccacaactgtccaacttttctaaagattggctaattctgaaataagactatatatgttagacatattcttaaatgctttacatatattaactcgtttaatcttcacagtaacaaccctgtgaggcaagtacgattattatttccatcttgcagatttggaaactgatgtacagagaaggtaaggaacttacccaaggtcacacaggtaccacattaggattgaagtgcaggaatcctgtttcctggtctgtttggttaacttaccttacactacgctgcctattgtttccatttgttaaccagccttcctcatcatctccgtacatgcttaatcatgtacagtttctaaactcactacctattctctgaacatttttagaataatgtaagtggttgttctaggcagcatgtgatattcctctttttaaaattaaattaaattattcattttttttgagacagggtcattgtaacctcagacacctgggctcaagcaatgctcccactccgccttcagagtaattaggactacaggcgtgggccacaagctatgttcctaatcctcattcactctttcttcctgagccattcctatagtttaacacgtaagtgagtacctattgtgggctaaatgctagaaatataaaggcaggtttttcgctggagcccctcccctccctgttgagttacttatgaggtggtcttggtaacatgataccatccttgctctgtcaccattttagctgctgtaatactttcctggtgcttcttctgagtctccttttcttgcaaggcagttggatgtggaagagaagcataggctttggaattacacaggccattgtttgcatcttaggattaaaatatgttgtttgatttgggaaaaaataattaacacctttgagcctttgctcatctgttaaatgaggagcaaagattcttaatttactgatttttgtgaaagtgaaataatttcttatgggtcaactatgcaacattgtgtctaatacattgtacacttgtgataaatatacatctccctccctcttccatttaccatttttgtcttttcttagtttttatcatagtcatcaagtcgcatcacttcatcttttgcacctttgggaatagcttctaaatccatatgcttaattatgtaaagatcatcacttaaaaagatgacttcttgtaataaaccacatagctgtttgaatctatttgtatatgttccttctaggttagggtaacaaaatgagaaggtaaaatatacagaattccattctttctcatttttcttatctaccttaaaatttgagtagattttctagaaagtaaagctggactttaaaagctcataggtaatttagtaataaagacaaccttctgaatataaatgcccacaagcctgcctttgacctgtcagataaattaagagaatttggaacatttactctctcttaatggaagagaatcttaaagtccaatataatttgctattcaaatgacgatttatcaggctttgcaccaccgattctctgttagagccttgaaataccagctagagccacttgccaaggaaggaaaacactacattaagaactacttgcttttccccagataaaagcttgtccaagttatgtaaatttgacaaaagcattttatttgatagctaatgtcaggagggatctagggttatctgttctggttccttatgttagctaatcatttggccagctagtatattccattcttgtggaggctggtggcatcaacatttacacagaaagttcattaaaaaataaaacaaacattgggccaggcactgttggctcatgcctgtaattccagcactttgagaggccaaggcaggtggatcacttgagtccaggagctgaagaccagagtccaggagttgaagaccagcctgggcaacagtgagaccctatcttaaacaaacaaacaaaatgttgatattgccaactcttaggtcagctagtataatcaaataagattaggtatgaatgtgcttttaaaggtacaaaaatctgtactatttactctgtttggagaacagtcagtttcttatgggtgtcagtcatggactactttgatatccatatgaaaagataacattctcattaattgtgtgataaacatttaaatagtcagcatttttgtggagtttataattttaatcctttggaatgtgctttcaggtccatgcaaacacaattccaatgttatgaagttttgagttctggagataatctgtagacttttaggtttttcttttccctctgtgaatagttttttatatacatatatataatatatatatttacatatatacacatataaacacatatataaagttttatattatatattaatatgtatcatatacatatatattattatctaataaatagatgtgtaaaaatgggtcatggagtatgcacacatttaattttgctgaataacaacaaaatgctttccagcctcttatgtttgtttaccttctcatgaacagcaaaaaataattcctgttttctctttgtctttagcaatacttggaaatttcagacttaaaaagattattgccaatttaataagtctgaagtggtatctttttctgatttgtctttctgattatagtgcagttgagcatcttttcatatgcgttttggtcataagtttacttttatgtttcctattcatctgttttgcacatttttagttgagtttttttttcttaatgatttgtgttaaagaaaaaactattctgacacttgttaaaacagtaaggaagagtgtattcaagactgttgcaataagggttgcttctatggcaacagcggagagagattgggttcaactctaaataaagtaaagacaggttggcatttatagccaattagcagagagaggggaagaatgcatggaatattcttaagagaaaacatcaagggtagggggattcctactaaaccaatttaatggaattcttgctgaaggcaggccagggtgattatatatcactttggggatggtggagaatgaagaattttttaaaaataattatttgatttttccctgagtcagagggaatgaggaatttgatcagatattaagagtgatcatatataaaggatgaggggattcttgctaaactgacttggcaggattcttgctatgactgaattctgcaaaaatggacacagaagtcgaaggtctggttgagaagagacctcagaggagcctaactgaaatttggtctaagaaagagtctgtcatttgtaggagttttacatatattctggatgttaattttccttgattaaatgatttataaatgtattctccaaatctgtggtttctcttttcactaagatttccttccatattttctttcaaaaattttaagtttaatttatttttgtatatgaggatccagttttttcctgtataaataagcagttatcctcgcttcttttgctgaacagatcattttattcctgccgtgtatcaagtttgtatgtattaatgtatctgtattttggctttctagtctctttcacttgtctatttggaaaaaaaaaacaaaactctgacctaccaccacactgccataattattatagtttttagtcagctataaagacaaggtctgctcctcaccttgttttttcactaaaagttgtctttgtttttccatatcaatatcattgtggagattttcattgacattgcattgaatttagagattaactaggctgcagcttacatttttatgatatttaagattttttggtttggtaatttactatattagaaatatttttaaaatattctgttagatttcttcctaattactttgtagctccacaggtatcacaaatgataacttttttcctactgttttctagttgattattactgctatgtaagagtacactgattttagtacactggttttgcgtcctgcagtagtgctgaattctcccagtattgttttgtttgtttattcttttggactttctgcatccatattgaagagcaaagaagccctttttaatttgttttctaattgttttaactcttatttctcttgttttattggcaagggctcgtaggacaatgttgagtagaagtggtgatagttggtaatttgtcttgtttccaactttaataggaatgcttctaagctcagtaggttgctttctttagttttctttttcttttaaatagccttaattagattaagaaacatttttctcagtgttgaatttcattgcaacttttttctttttctatattacagctaaatataggtaatctgtacttggctgatttttctacttttagaattagggaggcttaaagcagagtgaaaaattaaatgagtgaataattatattttctcacaaaatttgtgtcatttttgaattatacattgttcattaggtgttaattagtaacatgaacattagtgcaacttatctttgtcaaaagtacttgagtcaggtagatttgagtttaaatctgactctgataactaatcgggtttcttcaacttctaaaactcactttcttcatctgtaaactggcaataatatctacaaggcaggattattatgaggattaaatgaaatatttttaaagttatgactaagagtaggtatgcattaaatactaaatcttattatttctgtgtctaccatacaaccatacatcaccatcatgctcctgagaagtgagggtgatggggattaagtaagagaaacagcatctaacattatgtatagatgcaaagccacaaagtcctctatttcaatgacggaatattgagcaactgttgaaagagtaggagacttggttcaaagtcatcgaatcatatgccagatttataagcacttatcaactggaaggaggaaagcattttatgcagtggggtttcttgaagacataatggggatcattttgaagattcaaaagtagatggattagttcatgtaagagcaatttatagccaagagtgatatatatgagggcttccagaatagactaagagaacagggcctccatggcagtttgcagagaacaaaatcaaatagcaagtttgagcaaaggctataaaggcagttggattgaatttttagaagttaattaattaaattgacaaataataattgcatatatttatagggtataatgttatgttttaatatatgtacacattgtagaaagatgaaattaaacttattaacatattcatcacttcacctatttttcatttgttttgttgtgaaagcatgtaaagtctacttttttaaaagcagttttgaactatacattatgctatcattaactatggtcactatgctgtgtaatagagctctaaatcttatttttcctttctaagtataactctgtcccttttgaccaacatctctcctcctcccagtccccaggcctctggtatcaaacattctactttgtttttatgagctcaacttttttagattccatgtgaaaatgaaatcatgcagtatttatttctgtgcctggcttagtatcctcccaggttttaaaatatgcagcctttaaaaagaaggaaatgacaggatttccttctttttaaaggctgcatagtattctcttgtgtgttgataccacattttctttgtccatttgtctgttgatggattgaattttgatgctttgcttcttcctgagaacacatttcctggtgtcaggttcattagaagagagcttgatggacaaagtcccatgtgctaggccatcccatccttaggggcataacaaagaaaaaacagaagaaacagaagaaaatgaccaggggccagagtggaatggagtggtggtatatttttagctgtgaatacaggaacccctgtggaccctagtatattggaccttctttgagaaggtgtgtctttgtttgcattgccctggctcagacgaatgagaataatagatcatcttccatagtatgtttatctgaagatagagaactggtgtggggtagggagagaacattttggaataattttcaagaaagaggagattgggaagatctgccatggacagcagaaactctgtgggtaaggtgagaggtccaaagtgtatttaggacgtgttgctgtgtggtgtgtgtgtgtgtgctgaataactcattccttggtttagaaaaggctttggcaaagaatgcatacattttcaatgcttctaaagttacatgtagctactctggggaacattattttgctgcaagtagctgaaagaagaggaaaggctggatctggtaaagagatataggaaaagactagaaaagtaaactattttaaggagtttgtcattgaagtgaaaaaaaaatgagggagaagagcagttcagtggagtatcaggatttgggattgtgttagatttaagacagagaggaaaggccaggcagacagggagaggttgaacgttcaaaagagaatggaagtcatggtagggatatcttatggagcacatttctagagaaaaaatgaaaatagagtacaagtggagctgttcacaatgaaaaggaaaagggttcttattctaagatgggatggaaggtggagaaagtgtttgtgggtggattgtgagttagatgttctcaatttcaggcaggtgggaagtagtaatgaaggactgtggggttggggaaaagtgggaaaggcttttaataggctctctcttaatgtggttcacgttgactagcgatgataatacattgctgagtagaaagtcagaatcctcagccctgagccagtgtcctcattttcaggggccaaattgttgacgtttaccttcttcacacctacaaactcaaccatgtactacacagctgtgagatacagagtggtggcccatctagttagaatcacacactgttgtagacaaggagaacagtatgccttgaaactctggagtgcactgggagccaggtgatcacatgaaagtagtctgcttctttgtatgaagttccagaaacatcattatgttctttacctcctggaaggctgtccctgctcagatattctctgaaccatagtcggtgtcaaaatcagatgaatttggttccagaccactgcaataaagtaaatatcacaataaagcaggtcacatgatttctggtttcccagtgaatataaaagatatgttttcactacactatagtctattaagtgtgcactgtcattatgtctaaacaatgacattgatatcttaatttaaaaataccttattgctaaaaagtgctactgatcatccaagctttcagcaagttctaatgtttttgtaagtggagggccgtgcctctgatgttgacggctgctgaccagggtggtggttgctgaagtttggagtgactgtggaagtattttaaaacaatgaagtttgcaacatcgattgcttctttcatgaaagatttctctgtacatgcgagaacatgctgtttgacagcattttacccacagtagaacttctttccacattggatgccatcctctgaacctctaccactgctttgtcaactacatttatgaagtattctaaatcctttgttgtcatttcaacgttgttcacagcatctataccagcagtagattctgtttcaagaaaccactttgtttgctcattcatgagaagcaactgctcatttattcaagtttgatcatgagattgcagcaattcacttccatcttcaagcttaacttctcattgtaattctcttgctatttcccgtacacctaccgtgacttcctttactggattcttgaacacctcaaagttatccatgaaggttggaatcaacttcttcccaactcctgtaaatgtggatattttgacctcctcccatgaatcataaatgttcttaatggcatctagattgatgaatcctttctagaaggttttcaacttcctttgctgagattcattataggaatcactactatggcagctacagtcttacacaatgtatttcttaaataatatgacttgtaagtcaaaactactccttgacccatggacttcaggagggatgttatgttggcaggcatgaaaacgacattcatctccttgtacatccccgtaagagctcttaggtgactagatgcactgtcaataagcagtaatattttgaaaggaatttcttttatttttctgagctgtaggtcccaacagtggactgaaaatattcagtaaaccatgctgtaaacagatgtgttaccatccaggctgtgttgtttcatttctagagcacagacagagtaaatttagcacaattattaagggccctagaagttttggaatggtaaatgatcattggtctcaacttaaagttaccagctgcattaaccccaaacaagagagtcagcctgtcctttgaagctttgaaaccaggcactgacttcttctctttagctatgaaagccctggatggcatcttcttccaacagaaggctgttttaccaacattgaaaatttggtgtttagtgtgccaccttcatcaatgattttagttagatctcctggataacttctccatcagaacttgctacttcacttggcacttctatgtcatagagatggcttcttttcttaaacccaatgaaccaattctgctaccttccaacctttcttcttcagctttgtcacctctctcagccttcatagaattgaaaagaggggcttgctcctactttagggtatgttgtgggtggtttgatcttctatccaaaccactcaaattttactcatgtcagcaataatgctgctttgctttcctatcatttgtgtgttcattggagtagcacttttaatttccttcaagaagttctcctttgcattcacagcttggctgtttggcacacaaaacctagatttggtctatcttggcttttgacatgttttcctcactaagtttaatcatttctatcttttgattttaagtgagagacatgcaattctccttttacctgatcacatagaggccattttaggattattagttagcataatttcaattctcttgtgtctcagggaatagagaggccctacagaagggaggaaattgggggaatggctggtcaccggagcagtcagaacacatacaacattaattggttaagtctgccatcttatgggggcacagtcatggtgtcccaaaacaatgacaatagtaacatcaaaatcactgattacagatcaccataatagatataataataatgaaaaagtttgaaatattgtgagaattgccaaaatgtggcacagaggcatgaaatgagcacatgctgatagaaaaatggtgctgatagacttgctcaatgcagggttgcaacaaaccttcaatttgtaaaaatcacaatatctgagaagcacaataaagtgaagtgcaggaaaaagaggtatgcctgtacctgtcactcctgaataactaatagaaataataatggtggtagttggtggtgtgatgctggtggtacctgtcacgtgcaagaaatatacccatactttgtaaatattattcatatgcaacattcatttaggtgtaattatcttgattgtacagataggaaagctgaatttcagggaggtttaacatcagagtaacgatttgaacttagatttgttacactcagagttcttttaaaaaagcaaaattacttcctgatttgtatgcttctcatcgattaaaatggctactttaaataaaatctaagtatacatttatttttgtgaaaaaattcatatttatttgactagaaatttttgagcatataaaactagaacttactgacataaaaaatagttattgtgtagtgtgatgagtactagagtagaggcatatgcaagttactatgttgagagagacgtggtgtgttttggggtgggacgtgatgcaaatggagtggcgcatattgggatggaacatgatgaaagcgaaatggtcaaggatgctcttctgagaaaatcatgcttgtatccatcttgacagatatgtaagactttactgggataatacagttgggcagaacagcaacttaagtgcagagagtgcttccagtcattgtttttaaacatttgtcattttctaattttgaaacattcaagaaagtggctatagaacaatggtttttaatcattcccttagacagccgcttgatgaagcccattacctgttgcaacagacctaccaaattttgcatacaatttaaaggggttcatgaactcactgatgctcctctatgacctgccagccaatactctctgatatagagaaatacttgaaaaaggaacataaatggctatgggtaagagtagagggcactggggtagctttttagctattattatattaaattcctacaatagcactatgaacttggtattaagtcaacttacagctgcataaattaagatccagttaagtacagtgactccctcaagttcacacagataataaacagcaaaactatgctgaggtccccttctggggtcttgcatcccaagctcatgtttgctccatatacatgatactaatttcctaatgagaatattgctgtaataagttatgatttctaacaattagcttacaaatgaacttttgtaaaacaacttgtagtgagttgaggattgcccgcatagtgaaaccttgttagttttgattaccagtctgtcatagctgataatttatgatttgttttattttgctatgggcttggctatagagtattttggcagcatctgtaaaaatttcttttgaaacaatttttttggcaagattgcacctaaagcttctcaattatctagagaaattccaagttgttattatgtgtttgatatgttgtgttagtcttatccatacactgtggcaggttttgtgaagaacctctaccgttatctcgcctttgatgctggagagcccagtttgttagtgttaagttctggaaagcaataaaagtgcatctatctaaacatgttctatactaaattgctttcactaatcaagcaggacttatccctatttagaagaattagtgaggttttagtcaattaggcttgatgtcaagttaatttttcctccattagtgtaatgaagaattgctgtgttgttctgtcatgcatgctgattgataaaaaaagttaataatgaatgccaatacatttttctcttgaaaaatgaaccaataatatatgaggttcaagtaaattattctgctcatcagaaagaattgcttattctactgtgtggaaagcccagtggcaaaccaggggaagcaatggaatatttaaatacttattctattgctggtcagtctttaacatcagctttttaaaagattgccttataaaggatgtccatttcataattgttggatgactaaaatagaccactttgttttctttggcttctgctatttgcttatttaaaaatatttatattgtgctctattctttgcatgctgcattctgcagtttgggaatactgaatcaagacctggtgagtaacttttactcagtggattgcatgatgaaagatttgccaaaccataaggtgttttattgtaataaatgaaatccatctcccttgaagaagcacttgcagaggcagaatttactctacattttattattccattttatttattctatatattcaaagtaaggattctaaatcaaaaagataccaaagctaatgcatcctgtaaatgaagtgtggtcttgccaaactgctttttgaggttgacattactatattatatagtaattagcagactggctcatgcacacatacacacatgcacacacacacacacacaccctcatctataatatttatttgtctctacaatcatatctattcagttttgtgtctgaggtaaatttccagataacaaatttcacttttataactattaatacttcactaataatcttagtgaataaaaaaagaattgaagatatttgaagaacaatttaagtgctgactcttaataaaagtattaagggttagagttagggcattgattaggtagtgaaatttgattctactatatgtctgcttcttagatagagaatttcagtcccattctaaggctctcaattcaattaataactcttcatttatttaaattaagtggtgacattctcctgcctttaactttgctctccatgctaattattggctcaatttatttagaagtattattatagaagttttgaatcctaataagtagaaagagagaccaatgtgtgagcctaattctttttcgaagtgattaaggtattattactttttatttgttatcaggtatcagaacattaaaagtaaaataaaagaacagactttattttactgaatctctttctacttaggaatatcaaagtgcttaatgaacatgactttatcgaacctttataccaacttagtgaaagtggataaaagtcagaaacgtttagcagcagaggaaacaccaatagagattacattggagggttccataagacattccggcctctggtcttatgctttctagtgtatcctcctctattaccaggttacaaaatatatattggaaaaaataagtgagggatcagccatcattatagtttcctgggttgcaaacaaacacccaaatctagagattatttccatttagaaagtagaatctcaaacattcttttctggacaaacatcacttttgcaaaaatagtctgtattttttttgtaatttttatagtgtttgtgactttgatcaaaatcccagaatcatgtaacttttatattaaaacaataatggcaatcttaaactgggcctctgtgatatatcaggctacttttgtgacaacattttatattctgaatgatatcctggtccatacattaaatcagtgatgctatattaaagcgtaggaagatggtattcagtcattcatttcatcatttattttcttctcatctattcagtgatcacctgccaagtgccaagctctgctctacaccttagaaattccatgacaaactagacagaaaatgttcatgcgctctgccattctggttcattctagtgggacacacagcccaacatcatagagttacaaatgccatgcaggcacttataagtaggagctaactaatgtgtacatgtggacatagaatatggaatgatagacaatggagattcagaagggtgagcaggagggaagagggtgcatgataagatattacttaatgggtacaatatactttatttgggtgatggataccctgacatcaccactactcaatctatacatgtaacaaaattatagttgtaccccatacatttatacacataaaatacaaaaataaattttaaaatgtcctgcagggaattaaaatgtgatatgatgatgtctgggtcactatgttagtgtgggtggtcagggatgacttcctcaaggagaacacatttaagttaaaatcagaattgtaagaaggaaccatccatgtgaatatccgagagaataatattatggctgaggaaacagccagtgagaaatctctatggtaggaaacagttcagtgggttttaggaacagaaagatgaacagagtaggtaggcacagtggatgcttgtataaaatgacattggaaaacattctagatagaaattcttcttcaaagtaagcattcctgtgttctaacacttaaacagtgttaataatacaagacattggctccaaaattacattttattaaatgttataaactaagaacgggtcagtcaggaaaacaactgtcttttgcaatcagtttttgcaatctgtaaacagtagattatatgtagtggatttgaaagctctaggatggtgttttttttctcctcaacaattggaagtattattttaattgtgtgtgaagtgttagcaatcctcagaacacctcagcacattagttcagtgtcttctactcaaaaccagaggtacttgaatcctggaggtactccaccttccaggatggagactggcaaacagcaataaaataataatttcttaccttatagcaacaagctacttaattcagaaattcctcatctgaaaaactcaattctcttgagcagtatcttgacctcttattgcataggcttaggagtcaaatagtctgggcacaaatcctgactttcccattttctagctgtgtcgttttgggcaagtcccttcttccagtgtcctcatttatttcctctgtaatcaggatgatgtacttatcacaggcatttagaaaagcatcttgcaaacaataaatctttaacaggttatctgctttcattgctaatattcttacttttatgccctccctttccaaaccatcttctgaaaaaatatgtaagtccacaaagttagatgcaagatggttgccaataaaagtcttctgccttgagggctgggtgtggtggctcacgcctgtaatcccagcactttgggaggctgaggcaggtggatcatgaggtcaagagatcgagaccatcccggctaacacggtgaaaccctgtctctactaaaaatacaaaaaattagccaggcatggtggcacgcacctgtagtcccagctacttgggaggctgaggcaagagaatcgcttgaaccggggaggcagaaattgcagtgagccaagattgcgtcactgccttccagcctggacgacagagtgggactccgtctcaaaacaaacaaacaaacaaacaaaaaactgccttgatcactagaatagaggaggaagcctctgagatccattgactgaaatgtattttgatatttcatttctctacttaattcagcacccccccccaccatttaattaaaaataatatttattgaacacccattaaacgctaaattctcggccaaaaaggaaaaaaacatcttgtcctgccaggagattttaatccagttcttcaactctcagtagctaagaattggcaaacaaacaacaaaagcatctctgcactgaattttatgttatattggtgaaccaatttggaattgattaatgaactttttttatgcacatcctttccatgttgtgcataaatgtccatgtgtttgctctttggaaagactggaatacatgcttcatgggacaatgatttgtgaacatgtcatgagagaagatgtacttttaatattactacacatttatttagtcaacaaacactcactgagtgcctacagtgctactacattctgggtgaacaggaaccaacaacacagaaaataaaatcctgtatctcctggggatcacaggcttagcttctttggcatggaggctcaaatcctgtttctgcacatttctagaggtatgactttggttaatttacctaacctttctatacctcagttccctcatttgtaaaatggggataatatctatatagggcagttgtgaagattaaacgatggtatatgtaaaatgcgtaggacagtaccaggagcatagtgagaatgcggcaggaggctctgttattactataaatattattatcactactgctctgtgctccagtggtgtattctgtatatttcatgcccgattcttcttttcttaaacgggtcagcacatctttagagtggcacagtgacagctttcagagggaatgtggtcctggtacccttatcttgtgtggctcctacttctcacgctccatgtacagagtagagacagcctctgtttttctgaactattgaaatataaaccagggtgccagttgccccttgcagagaatagctttatatttgtctctctgttggcaccttgcctattccttatcacccccacttggtcctaagtgcctgttctgtcatggtggttgcagttaccactggctctaatctctcttctcatctatttctttgcctcttaccactttccctaagctccttgaccgtgtgtttctagatcttctctgccacagaaagcagtctctctttttttgcaggtgagtcacatggagtatattgagtgggatcttgaatatttcagttcttgatgtaattcatgtcaaatgttaagacatgacaggcagctgctgcacggggttggtttctccacggcatcccatcctacccctgttttctcatatgaattattctgaaagccttgaggctgatcagtgtagatattcctatattttggaaacactacttttaaggatcctagcaactgatttctccaacttacattgaaatttaaacaatttcctggtgcctcctgaatccctttaagatgttgcagtaagaatgagagttgtgtaggcggggaggtacattttatgggctttttataagaaatgatatcctgtgtcctgaatgtaccagtgcattaatgccatcctcatctgtagcaacagtaagcagccttttagagtggtataaatagtccattaggataaccataaatatttaactattatttactttagattccattggcaaagtagcagatttcttgaaaacctctcaggtttctcctaaattgttcttttcaaggcagtaaaaatgctatggtcccaaactgaaaataactgattattaattaaactactaaagaccaaaacaactttactcacattccacaggattggagagacaggaaacaacttgcgaggtttctagaaattgttattttcttgttaatggttattttaattagcaaagagagttttggaaatagttttgagctttacctgaaactgaatgactggaaggtaagtgcatttgaattatatttggttacatgcattaaaggataaataatttctcttttctcatgtgaagcttcattttggtagttagctgacttttcaggtaaggagaaggaccaagtaatcaccagctataaaatacaaacatttatcactggaaaacctagtaatgaaagcaaagcctatcaaaactttatgtttacagaatgcgtttaactctttttaatatattcatgtctatgtaatccttttgttacttttttcatgaaaacttatttaacagtatatatagttcatagtattgtgttgtggaatgagcattagactttggatatgtcaaatcctttccagagagagatggcctactcaaataaggataaataataaataggggagagacactttgtaaaactctgagcacagtgtaggtgaaccacagggcagtaacctgaggctagtaacagtggagctgtcaacaacctatgaccaaagggaaaagggaagaaaaaaggttctctagaacttgaaaggagctagttttgtgtagaaagctactgtacgtggaacagtgatctttagttgtggacatagccagcctaagttaaccttcaaggagggagccaagggaataaatatcccgatccccactcctccttccctccaattttgttagagctcactgtctggaacctgctgagcacctggacatgagggcctttgatagagtgcctgcaggtcttatggggaaagaagagcggaaagcggatctggagggagaaatgaaagataccttgaatactctaccacttttctctctatcaacctccaatcttgtcctccatgtggttgacaaatgcatgttcctaacacagggtatgcacaaaatcccatcaactaccatatcattcccatgatgtcttttactaatactgcaacctgactaaaatattggtccccagcaacactcttcatataaaatattgggagaagaggatgcaattaaggaacattaattatagctgcagctcacttctggagctggtcatgaggcctaaactgctcattatagggcccccccatcgacaataccttctgtatttaccttactgtctgacatcaccttgactggatgagtcattttccagttagggcaattgaaatcttcatttctttaagatctgagtgcttggtagtcttgtttttattgggggatcgttgctattttcccttgaccaggactatcgggaagggagtactaagaggcatcccactgaattccctgagttttaagcactgtccttgtcttcattctgtagcagaaaatcaattccccctgatcattaggtgtgattaccctagctagttatagtgactttctcatctctgttggttcagggccataaataaatttaaattgccaggagttagtctctacttccagtgaatcagaaaatgaccatgtttcctggtataagaattactgccttggacagtagggccatcaaactcatcaagtccaaggtttcggggacaggaggcaagaattctttttttttttattattatacttaaagttttgggatacatgtgcagaacgtgtaggtttgttatataggtatacatgtgccatggtgatttgctgcatccatcaacccgtcatctacattagttatttctcctaatgctatccctccccttgccccccaccccactaacaggccccagtgtgtgatgtttccctccctgtgcccgtaagttctcattgttcaactctcacttatgagtgagaacatgcggtgtttggttttctgttcctgtgttaatttgctgagaatgagaatgatggtttccagcttgatccatgtccctgcaaaggacatgaactcatccttttttatgtctgcatagtattccgtggtgtatacatgccacattttctttatccattctatcattgatgggcatttgggttggttccaagtctttgctattgtaaatagtgcagcagtaaacatacatgtgcatgtgtctttatagtagaatgatttataatcctttgggtatatacccagtaataggattgctgggtcaaatggcatttctggttctagatccttgaggaattgctacactgtcttccacaatggttgaactaatttatactcccaccaacagtgtaaaagtgttcctatttctccacagccttgccagcatctgttgtttcctgacattttagtgatcgacattctaactggcatgagatggtatcttattgtggttttgatttgcatttcgctaatgatcagtggatgatgagccttttttcatatgtttgttggccacataaatgtcttcttttgaaaagtgtctgttcatattcttcacccactttttgatggggctgtttgtttttttcttctaaatttgtttaagttccttgtagattctggatattagccctttgtcagatggataagattgcaaaaattttctcccattctgtaggttgcctgttcactctgatgatagtttcttttgctgtgcagaagctctttagtttaattagatcccatttgtcaattttggcttttgttgccattgctttttgtgttttagtcatgaagtctttgcccatacctatgtcttgaatggtattgcctaggtttccttctagggtttctagggttttaggtcttacatttaaatcttcaatccatcttgagttaatttttgtataaagtgtaaggaaggggtccagtttcagttttctgcatatggctagccagttttcccaaaaccatttattaaatagggaattctttccccattgcttgtttttgtcaggtttgttgaagatcagatggctgtagatgtgtggtgttatttctgaggcctctgttctattctattggtctatatatctgttttggtaccagtactatgctgtcttggttactgtagccttgtaggatagtttgaagtcaggtagcgtgatgcctccaactttgttctttttgcttaggcttgtcttggctatacaggctcttttttggttctataagaaatttaaagtagtttttttctaattctttgaagaaagtcaatggtagcttgttggaaatagcattgaatctataaatttggactgtatggccattttcatgatattgattctttttatccatgagcatggaatgtttttcatttgtttgcgtcctctcttattttgttgagcagtggtttgtagttctccttgaagaggtccttcacatcccttgtaagttgtattcctaggtattttattctcttggtagcaattgtgaatgaaagtttgctcatgatttggctttctgtttgtctgttattggtgtataggaatgcttgtgattttagcacattgattttatatcttgagactttgctgaagttgcttagcagcttaaggagttttggggctgagatgatggggttttctaaatatataatcatgtcatctgcaaacagagataatttgactacctcttttcctatttgaataccccttatttctttctcttgcctgattgccctggccagaacttccaatactatgttgaataggagtggtgagagagggcatccttgtcttgtgctggttttcaaagggactgcttccagcttttgcccattgactatgaagtgggctgtgggtttgtcataaatagttcttattattgtgagatatgttccatcaatacctagtttattgagtgtttttagcttgaaagggtgttgaattttattgaaggccttttctgcatctatcgagataatcatgtgttttttgtcattggttctgtttatgtgacggattgtgtttattggtttgcatatgttgaaccatcctcgcatcccagggatgaagcctacttgatcatattggataagctttttaatgtgctactggatttggtataccagtattttattgaggatttttgcgtcgatgttcatcagggatattaggctgaaattttctttttttgttttgtctctacctggttttggtatcaggatgatgctggcctcataaaatgagctagggaagagtccctctttttctattgtttggaatagtttcagaaggaatggtaccagcttctctttgtacatctggtagaattcgactgtgaatctctctagtcctgggctttttttggttgttaagactattaattactgcttcaatttcaggacttgttattggccttttcagggtttcgacttcttcctggtttagtcttgggatgctgtatgtgtccaggaatttatccatttcttgtagattttctagtttatttgcgtagaagtgtttacagtattctctgatggtagtttgtattcctgtggatcagtggtgatctcccctttaccattttttttattgtgtctatttgattcttctctcttttcttctttattagtctggctagcagtctacctattttgctaatcttttcaaaaaaccagctcctggattcattgattttttgaagggtttttcatgtctcaatctccttcagttctgctctgatcttagttatttcttgccttcagctggcttttgaatttgtttgctcttgcttctctagttcttttaattgtgatattagggtgtcaattttagatcttttccactttctcctgtggatatttaatgctataagtttccctctaaacactgctttagctgtgtcctggagattctggtacgttgtgtctttgttctcattggtttcaaagaacttatttctttctgccttaatttcgttatttacccagtagtcattcaggagcagtttgttccgtttccatgtagttgtgtggttttgagtgagtttcttaatcctgagttctaatttgattgcactatggtctgagagactgtttgttatgatttccgttcttctgcatttgctgaggagtgttttacttccaattatgtggtctcttttagaataagtgctatgtggtgctgagaagaatgtatattctgttgatttgggggtggagagttctgtagatatctattaggtcagcttggtccagagctgagttcaagtcctgaatatccttgttaattttctgtctcattgatttctctaatattgaaagtggggtggtaaattctcccactattattgtgtgggagtctaagtctctttataggtctctaagaacttgctttatgaatctgggtgctcctgtattgggtgcatatatatatttagtatagttagctcttcttgctgcattgatccctttaccattatgtaatgcccttttttgtcttttttgatctttgttggtttaaagtctgttttatcagagactaggattgcaacccctgcttttttgttttgtttttgtttttgtttttgttttttttgctttccatttgcttggtaaatattcctccatccctttattttgagcctatgtgtgtcttcttacatgagatgggtctcctgaatacagcacactgatcggtcttgactctttatccaatttgccagtctgtgccttttaattgggccatttaacccatttacatataagcttaatattgttatgtgtgaatttgatcctgtcattatgatgctagctgtttattttgcccattagttgatgcagtttcttcatagtgtcaatggtctttacattttgctttgtttttgccatggctggtactggttgttcctttccatatttactgcttccttcagagctcttgtaaggcaggcctggtggtgacaaaatccctcagcatttgattgtctgtaaaggattttgtttctccttcatttatcaagcttagtttggctgaatatgaaattctgggttgaaaattcttttatttaagaatgttgaatattggcccatactctcttctggcttgtagagtttctgtagagagagccgctgttagtctgatgggcttccctttttaggtaacatgacctttccctctggctgcacttaacattttttcctgcattccaaccttggtgaatctgatgattatgtgtcttggagttgctcttctcaaggagtatcttagtggtgttctctgtatttcctgaatttgaattttggcctatcttgctaggttgaggaagttctcctggataatatcctgaagtgtgttttccaacttggttccattctccccatcactttcaggtacaccaatcaaacgtaggtttggtcttttcacatagtcccatatttcttggattctttgcttgttcctcttcattgttttttctctaatcttgtcttcatgctttattttattaagttgatcttcaatttctgatatactttcttctgcttcatagatttggctactgatacttgtgtatgcttcacgaagttcttgtgctgtgtttttcgactttatcagatcatttatgttcttctctaaactgactattctagttagcaattcctctaacttttttttcaaggttcttaggttccttacattgagttagaacatgctcttttagctcagaggagtttgtttttacccaccttctgaagcctacttctgtcaatttgtcaaacttattctccgtctgattttgttcccttgctggtgaggagttgtgatcctttggaggagaagaagcattctggtttttggaatttttagcctttttgtgctggttttccctcatcttggtgactttatctacctttggtctttgctgttggtgaccttcagatggagtttttgagtggccgttctttttgttgatgttgatgctattgctttctgtttgttggttttccttctaacagtcagacccctcttctgcaggtcttctggagtttgctgggggtccactccatcccctgtttgcctgggtatcaccagcattggctgtagaacagcaaagattgctgtctgctccttcctctggaagcttcgtcccagatgggcacccatcagatgccagttggagcccttctgtatgaagtgtctgttgagccctgctgggaggtgtctcccagtcaggaggcacaggggtcagggacccacttgaggaggcagtctgtcccttagcagagctcgagcactatgctgggagatctgctgctcttttcagagctggcaggcagtaacgtttaagtcggcggaagctgcgcccacagctaccccttcccgtgggtgcactgacccagggagatgggagttttatctataagcttctcactggggcggctgcctttctgccagagatgccttgcccagagaggaggaatctagagaggcagtctggctacagtggctttgccgagctgtggtgggctccgctcagtttgaacttcctggaggctttgtttacattatgaagggaaaactgcctactcaagcctcagtaatggcagatgcccctccccacaccaagctcgagtgccccaggttgacttcagactgctgtgctggcagcgagaatttcaagccagtgggtcttagctttccaggctccatggaggtgggacccgctgagcaagaccacttggctccctggcttcagccccctttccaggggagtgaatgattctgtcttgctggtgttccaggcaccactggggtatggaaaaaaactcctgtagctcgcttggtgtctgcccaaacaaccacccagttttgtggttgaaacccagggcccttgaggtgtaggcaccctagggaatctcctggtctgtaggttgcaaagaccttgggaaaagcatagtatctgggctggagagcactgtccctcatggcatggctcctcatggcctcctttggctccaggagggaggtccccggctccttgcacttcctgggtcctcaccctgcttctgcttgccctcagagggctgcacccactgtctaaccatcctgaatagatgaactgggtacctcagttggaaatacagaaatcacctaccttctgcgttggtctggctaggagctacagaccagagctgttcctacttggccatctggcctgtcagtaagaattctttaagtggtgtattaggcataaaaataagatagattactttatttatctgtttatttatttagagacaaggtctaactctgtcgcccagctggagtgcagtggcgcaatcatagctcactgtaactctccttcagcctttcgagtagctgggaacataagctcatgacaccatacctgggtaattttttctttctttcttttttttttctgagatggagtctcactctgtcacccaggctcggctcactgcgatctcggctcactgcaagctctgtctcccgggttcacaccatcctcctgcctcagcctcctgagtagctgggactacaggcgcccaccaccactcccagctaattttttttattagtatttttagtagagacggggtttcaccatgttagccaggatggtctcgatctcctgacctcgtgatctgcttgtgtcggcctcccaaagtaatatattttttgtatagacgaggtctagttatgttgttcaggttggtcttgaacacctggcctcaagcagtcctcccccttggcatcccatagtgctgggattactggcaggagcccctgagcctgacttataccccttttactctcacctcttggttcctggatttgtgcattctctacagcagagatgacaccatatacttggctgcccaacctatgaacagaactccaacctctcagggtgttatctcttggcttgcaccctggctgaggcttcatcaggacatttcatcattctgtcaaactggttgctactagagggtgcaggtgatgtgatccatgaattatatgtattgagcccactgtctcacttcctttgctaaaaaatggttaggagatagttttcacaggaaaccttggctatatatcagttgcactataagtccatgaatgatggtgcttgcagaggcactgaaggcagggaagacatatattgtatatgtctatctttgtgagtccaagagcatccccttataatgggaggaatccagtggaatcattctgctaccacatacagccacctggtcctcttgccctgttggacagtgatagctttttgggggctcagcatcagccttggcttttgaagtttgggacttctttagtgctggaaagccagattccccctggtaggagaagagaatgctgaacctatatatatcctccctctgcaccactctgtgctttatatgtgggtccattaagcaaacatttggatggttgatgaaggatactgagtgacaatcagattttcttgttcactttattactgaagctatcctctgtgatggccttttatgagatttagtggaatagaattagattcacattctgtacttattaaaagagactcttccatatattcttcacctcctcctttgtgtccttcttgtctgtccttatctttctcctccttttagtcctcttcctgctcctcttactcatgcttgctcgtttccttctccttgttctccctgttttccttttcctccttctccacatgctccaccttgtcctcctcctaatcatccttctcttcatcctcttcctcatcctccttctcatcctccttatacttgtcttcctcctcctcctcctcatgctacttctccctttccttgtgctccctattcccccaggcctcctcatcctctacaactttctcctccttccttaaactgttctgcaataagcccatttgttttctccattttaatttctaagtactttttttgaaaaaaattttgttttttgccctccaatttatgttgggattcaacatagtctccctctatttttttaactttggtgcatgatattctttctcccccattctgataacactacacattgctttgacttccatccccattaataactaagtgaaaggtgttacaagtcttgctgaagattacacggtaattcttctcacagccaagcttgaactcagttttagattccagacttagtgtcttttcactaggctgaattgcctcatcatggctgaggatagaaatagcctcatatttagagtaaaactcagacaagaaagcaagcaagtgaacaacaataacaatagaaaacaaaaatttaaaaaggaaagagagagataggcatattcactaatttaactacaggaacttgaatttagtgttctctctgctcagtgatttaattctaggtgaattaaaaaagaagtttctgtgaaggtttgctgactttggtttgttccaaaactattaaaaatgtataactcttacctgctcaacagtatcatttgggaccaaagcatgaggcataataaatagagtcaataatatctgtacttagaggtatgagaatcattcctgatatattaatttaatttcttctgtaaaattaagggtgtttgtatacagactctgtagtgatatcaggtagtcaagacttggttttgtagtcttcttctgaagtcatcacaataaggaaattttaaacatgtaattagacaaattagattggaagatgaaaacaactgctttaattcaaaataatctcattaagtatatcacggcattaagttttacaaagcccaggtcacttcctctgtggctttccctatgaccacctttgtttctccttcagctgtaattgcttcccgctctggggcattttttatgcaaactacccgatccacctgtgctaaattatgattgtttattgtgttgtgcgtttaagatacagctataaaataaaaagcccacattttaagaaaagatagaattttttatgcggataagctttgtttcttaaaataaaaaagatttgatacttactcaatgttgcatcaagcgttcagaagagttttctgagaggtggggaagtctccttgcgaattaccttcagatcctattacagagaagaattcccatccccgatatgtgtgtagtagtaaagcactgttgccaaaaatgcccattcactctttttttgtatctctgggtaagtttaccaacctttttgtgctttaatttcctcaactataaaatgatggtaacagttgtactttcctcatagaattgttccaaatgaattcggtatttgaagtgcttagaacagtgcctagcacattataaatgctatgtgcctttgctgttactatttctactacgaccacattggtgatgacaatgatgatgaatcctattactaacagtttcccattcatttcatattaattaaaaaaatatttgctccaaatgcttttatctgtgcctacaaacaaacaaaaatccaaaggtgcagatttgccactaacgaaatagtaaagagatgtattgcaggatctaaggctgattctgaaagtgttggtccccaaagtgtttggagtggtgaagtgatattggagtaactgtaaaacctcttagatggttgctctgaagtaagcccctctctgttggatatatattgcatgttttttttttaatgtatccatatatattatgacttgtttctccaatgtaaatacacttcttgaagacagaagctgtgttttccatttctgtgtatttcctatagcattcaacagagtgttttacaaatttcagaagttcaataaatgtaatgattagctgcttaggtagaggtgagaggaggagaattaggaataaaatgttctccagttaattgcaaagtgcttttgtacttaaaaatgaatttgcattttatctttttctacaacttctggaaagtgttttagttggcatttgtcatttgattttgtacaattttgtaaattttctggaaatctaaattcctacaaagagtccatcacaggattttctattttttaattgtttctacatgaaaggaagtgttagtgtaaaggctagcctgttccatttacacttcatgcaatttgttaagaaaataattaagctttggagctggtagagaccatattgttacagcctaaaccctccacagggtacctggaacagaatggaaactcaataagttgttgataaataaatgaatcatttagtacaatgtcttcatttcacagttgaaggaactctgtgataacttgctccctgtcacatggtggcataggaggggttagaacaaatgttgctgatgtcattcatcatgctctagttgtggatttcacatttaaattgtaacataaaaaagactttaagtttagtctttgaataacttccttcattttaaatcttgtgtataaataaatttcttaggttaatatctgctacattttagaaaggcagtaggaagaagtttatacaagtcaaaagaattgttttaaagggaaagtaaaggaaaatatctgttagtggcttattcgaggtgtgtcagttgatgaatttcctttctctcaaccataagttttctttgctctgttatatattattagggtttcctagttactctaaaagactttctgttggaacaatttgtttttctcaagcacaacccatctccaacttgtctgtatttctgagactttcaagaaatgttggttatcattttaattgattttctgctaggatggaaaaaaagagccaagttcatgtacctgtttgaaggggcccaaactgtcagaaatagggacgattgcctggatgataacgctctgcgatgccctccacaatttcatcgatggcctggcgattggggcttcctgcaccttgtctctccttcagggactcagtacttccatagcaatcctatgtgaggagtttccccacgagttaggtaaggagctctgttcatattgtaaaagtctgcttacttcttgatttcagtggaatgagacttttcaggtgacatgctcttaaaatccttctgatgcactaaaatgaagaccttgttggacattgatgattatctttgatatcatccagaaataaaaaaaaaactattcacttgatattttcttcttcttcttctaggagactttgtgatcctactcaatgcagggatgagcactcgacaagccttgctattcaacttcctttctgcatgttcctgctatgttgggctagcttttggcattttggtgggcaacaatttcgctccaaatattatatttgcacttgctggaggcatgttcctctatatttctctggcagatatggtaagaagcttaaaatttgtattttcttttaatttaaaatttggaaatgagtatctggattataagttaactaagggtggccttctgctttccgcagtgtggaaggcctttctgttgtaattcagaacaatcccatttcaacagatcattctacttgagtagtttacactaatagtaatttgaaactgatcctcactggttctttaaaacataatcgtattgtttgaaggtgaaatgatttgtttttgctgaaatagagatattttcctctatctctattccccttgtggttggtacatcttgtcttatgttatagtatgtccctataggactttttctcctttttctccctcttttgtgtctatgccacatttggaagaggaataacttattagagtaaatagcattttgttatttcaaagttctaaacagtgacagctttttgggttaaactaaaactggtacactaaaattggtaaaattttgacaatagttatttgacatagtatatatttatatctgttcaatgtctgtgtctttgtatctgtgtgtatgtgtgtgtttgtgctcaaaagagcgtgcatggccgggtgcggtggctcatgcctgtaatcccagcactttgggaggccgaggcgggcggatcacaaggtcaagagatctagaccatcctggccaacatggtgaaaccctgtctctactgaaactacaaaaattagccgggcgtggtggcgggcgcctgtaatcccagctactcgggagtctgaggcaggagaattgcttgaacccgggaggcagaggttgctgtgagccgagattgtgccactgtactccagcctgacgacagaacgagactccatctaaaaaaaaaagagtgtgcatgtgtgtgtgtaagagagagaatatcctgtgcattttaaaataaatcatggaaatctttctataaaatgataatatggtagtgtatgaaaatcaaggactatttcttttgcatttggaactggatgtattacatacataatttaataatttgagttttttatttgcattcttacctccaaattatatttgtctagctctgttcgttgttctctgcagaccctcagaagagcaaggatttcatctcttagaaccaatgctacatttataacttttgtcacaaaattaatgtctcatgctatcttatagtcattttactttctgatataagaatggaatcttactagagttgttcagtttaaagaaataatactaagaaataatactcatcctggagtgagcaaaataggcacagttcaaggggcttttccattcatggggcttttcctctagaaagaggggatccttaaattaaacaacaaaaaatcacacagatgactaaataattacaaataataaaaaatgctatgaaataagagagaaagtagaatatatgatgagagatgataataaaggaatctagaataaactaggattagctagcaaaagtgttttagcaagatataaggtaaaacgtgaaggatttagtccactgaaaaattagagaaatacaagttctggtacaggtgatggtagatgtgaagattttgctgggtaaacttgaggtcatgaaagaatgggttgggtgaagcatagagagcaggtaatggaaaaggagaaagagaacataaaatgaggtaaattccatcccactgattgattcagttggagaaaaatactacttcagtacttttactcttgttgatgcctgaaagaactagatattcctattaagctatcagtactaaaacctttaaacatccaaagtaaatgatcataccacccctcccagcattctattacaggagcaccttgttttattgcacattgctttgatgcactttgtaaatgctaggttttttgcacattgaaagtttttggcaaccctgcctcaagcaaatctgtcagtgccattttttgaatagcatgggcttatttcctgtctctgtcacattttgttaatttttaaacgatttcaaaccttttcattattattataatatctgttatagtgatttgtgatcagtgatctatgatgttactattatgttttgggacgccatgaaccacattcgtataaaatggtgaacttaattgacaaatgttgtgtgtgttttctccctgcacccctgatcagccatccttccatctccctctccttgggcctccctattccttgacacccaacaatgttgaaattacaccaattaataatcctacagtggcctctaagtgttcaagtgaaaggaagagctgcacatctatcatattaaatcaaaggcctgaaatgattaggcttagtgaggagggcatgttgaaacccaaggcaggccaaaagctagactttgtttgccagatagcccagttgtgactgcaaagaaaggattgatgaaggaaattaaaagggctactccaatgaacacacaaataataagaaagcaaaacagccttattgctgacatgaataaaatttacgtggtatggatagaaagatcaaaccagctacaacattccgttaagcaacagcctatttcagagcaaggaataactctcttcaattctatgatggcttacagaagtaaagaagctgcagaagaaaaactggacattagcagaggtgtattcattaggtttaaggaaagaagccatctgtatgacataaaagtgtcaggtgaagcagcaagtgctgatgggaagctgcagaaagttatccagaagatctaactaagatcactgatgaaggtgactacactaaactaatagattttaagtgtagctgaaacagccttctgttagaagaacatgccatccaggactttccatactagagagaagtcaatgcctggtttcaaatcttcaaaggataggctgactgtcttactagggactaatgcagctggtaactttaagttgaggtcagtgatcatttaccattccccaaatcctagggcccttaggaattatgttgaatccactctgtgctctagaaatagaacaacacagcctggatgataacacatctgtttacagcatggtttagtgagtattttaaacccactgttaggacccactgctcagaaaaataaaagaaattcctttcaaacattactgctcattgacagtgcatcaaatcacctaagagctcttatggagatgtacaaggagatgaaagtttttgtgcttgctaacacaacatacattccgcagtccatggatcagtccatggagtagttttgacttacaaatcatatcatttaagaataatttgtaagtctctagttgctgtagatagtgattcctctgatgcatctgggcaaagtaagttgaaaactttctagaaaggacttatccttctagatgatatgaagaacatttgtgatttatggaaggagtcaaaatatccacattaattgaaattggaaagaagctgatttcaaccctcatggatgactttgaggtgttcaagacttcagggaaggaagtaactgcagaggtagtggaaatggcaagataactagaatgagaagtggagactgaagatgggactgaattgctgcaatctcgtgattaaactagaatgaatgaggggttgcttcttacggaggaacaaacagtgatttcttgagacagaatctattcctggtgaacattgctgaaatgacaacaaaggatttagaatattctataaacatagttcataaagcagggacagagtttgagaggattgcctccactttggaaataatttctactgtgggtaaaatgctgtcaaacagcattgcacactacagagaaatctttcatgaaagaaataaattgatgttgcaaatgtcattgttgtcttattttaagaaatttccacagccactcccatctttagcaaccactactctaatcagtcagcagccatcaagatggaatcaagactccaccagcaaaaagattacaactcacccaaagctcgaatgattggtagcattttttagcaataaagtatttttttaaattatggtatatacattgcctttttagatattatgctattgcacacttaatagtctacagtataatgcaaatatatctattatatgcactgggaaacctgggaattcatgtaacttgctttattgagatgtttgctttatcacactggtctggaaccaaacccacactgtctccaaggtatgcctctaagtgactgttttgtggtttgccacaagatggcaacagttatctaacaatatatctgtcttctagtttccagagatgaatgatatgctgagagaaaaggtaactggaagaaaaaccgatttcaccttcttcatgattcagaatgctggaatgttaactggattcacagccattctactcattaccttgtatgcaggagaaatcgaattggagtaatagaaaatggaagatggtgttgttaataaaggcatttaatagataaaaacatctccaaaaaggattttgaagctgatcctatttagttaaaaagataattttgctttcaactgtaggtccagaaaactaattattggcatcagtctgtgaaatagtccattatttgttgttaaaaatgcttcaaaaggttttcagtgtcagtctgagatgcctggtatataggagcctttgggaaatacctatttttcagtattccatgcatattagatatcaccatgaagcaagagacatgcattctataatcatgtagacactcagactcaggggaaaatacaagttatatcctgaaagcctttaaaactctatggtaggatcaaagattcaaatggtttcagagaggttttatttcaattaatttgttctagtgctttcaagagcaagtacatcaaaatgtagaaggtaaaatgtatgcaacactaatataaattattccaagtctttaaggagccaaagaaaaaaaagatttctcacagctttttgttctgttttgtatttcaattaggaacttgcagtattattttgaaaaccattctaaaataataggagttaggaaataaataaagttttgctagccctgctaagttcaggcttagaggcttatcgctaagtataaacttcaccagattccacgaaaagctggatagctttttttctgacttatgttgtggttgcacccctcacaaatggcagaacagtatgtaaagctggtaacacctcggtttcagtgcaccatgtgtttgctttgtgaaggtgaagaatatgttggtttagagaaagaaattggatgtaattttatgcaatttacttttaaagacaaacataactatttagcagagaatattttaataaatgcaaaacaacagctggactgctgtacatcaaggacagattaactggaaaacatatgttccttatgtgtgatcgagagccattcagaaaagacttcctttgtgttcagcctatacttttccatatggtataccttgaaaaaaattagcacaccatggttatttttctaccttttataaaagacagagcctgtttactcatttagaagatagagaaaattggtctaaaattgaacatcctagattcacactcccaagtcacttaaggtgatttgatggtgaggaaaatgattgacaaagcccaacaatgatctcaggaattacattttccaacagaccaaaaaatgttttcatgtagcagcaatgcagatttggtgaatatttaatatatattttagtatgtatttcactttatgactgacaattaaaaaatattgtttggccaaatagtaaacacccttttgaaaccatg

SEQ ID NO: 4 - DNA, 6834 bp, Homo sapiens
cggaaggggaagggggtggaggttgctgctatgagagagaaaaaaaaaacagccacaatagagattctgccttcaaaggttggcttgccacctgaagcagccactgcccagggggtgcaaagaagagacagcagcgcccagcttggaggtgctaactccagaggccagcatcagcaactgggcacagaaaggagccgcctgggcagggaccatggcacggccacatccctggtggctgtgcgttctggggaccctggtggggctctcagctactccagcccccaagagctgcccagagaggcactactgggctcagggaaagctgtgctgccagatgtgtgagccaggtaagagggggccttggtaagggccaggtgagtggcgaaagagagaggactggggttaatacagtaaataggcgcagggtgagactgagctcaagcaaggagggaaatcctgcagctgtggggaggcaccaccttgaagagggcagagaaccagcccttctcaggccttgatcccttaccctctcctcccaggaacattcctcgtgaaggactgtgaccagcatagaaaggctgctcagtgtgatccttgcataccgggggtctccttctctcctgaccaccacacccggccccactgtgagagctgtcggcactgtaactctggtgaggtgggcaagggtgtgtaggtggggacgatggacaagcatctgggggagcaaggctggtgacgggtttgggggtgcaaggaggatgacggggccaaagctttggccttcttcaaggctcacagcaagtggagccaatgctgggaaatgcggcaccctaggtggggcatgaattaacgtgggcagacatctagtattccaggaaagggataaatagaatttgagggattggtgagaacgggtctatggataggatcaagacaataaaatgagagaagtggctctatgaccccagatttcgggcaagcaacccccaaccaataaactgactgtgttcccagagtgcacatgtgcaggttggccattgggaatttggaatacatctttctaaggaaataacaaagcaacccaataggtaacaacctttttttgcacaaaagccaatttgagaaaatgagtatgtatgtagcctgtgtttttattttatagttccaaaaaaaaaggttttttttaaactaagaagtataatatctgcagttgtgcttatgaatgctgttattatttctccatcttcgctacaatttcagaaactacggccagtatacactagaatagcaggctttaaagtggcccctttgaacaaatgttctctagcaagacactttttagaaccaggtaactgtaactattaaactacctacttgcaaaacgtgtttggtgtcactgggtctcttggtactgggttttgttttgtttagtttagagacaaggtctagctctgtcacccaggctggagtgcagtggtgcaatcatagctccccacagccttgaactcctgggctcaagcaatcttctagtctcagcctctgaaagtgccaggattacaggtgtgagctgtagtgcctggtcccgtaaaaacaaaaacaaaaaccaacaccagatgtggtggctcatgcctataatcccagcacttgggaggccaaggcagaagggtatttgcatattttgtagagacttgagcccaggagcttgagaccagctgggcaacatagtgagaccttgtctctaaaaaaattggctggtcatggtagtgcacctgcagtcccagctacttgggaggctgagatgggaagatcacttgagcccaagaggtccccaagaggtccaggctgctcacatcactgcactccagcctgggtaacagagcaaaaccctttttcacacacacacacacacacacacaaaaagccagagcagtggctcacacttgtaatcccagcactttaggaggccaaggcaggcggatcccttgagcccaggagtttaagaacaccctgggcaacatggcaaaaccctgtctctactaaaaatacaaaaagttagccaggcgtggtggcacgaacctgtagtcccagctactcagaaggctgaagtgagaagatcacttgagtccaggaagtggaggctgcagtgagccgtgactgtaccactgcactccagcttgggagacagagtgagcagagtgagaccctgtttccaaaaaaaaaaagaaaacaaaagcttttccattgcaaatcaaccaaaaaggaacgtctttaatacacaagaaatattcttcagtctacttaacttaaaaatgtaactgtaatagatgcttttctcttgacagcggccccggcagggttggaacttttcctagtcaaaacccccctactcactctgcagacccttcctgaaggtcttcgccccatactgagcccatcttcagtcccttcacttgttccaaactagcccaatccatgacccttctctgggagctcagccaatagatcccaaagtaccacagcagcacctggctgcagaaggacccccgggaaatgcagtcaggggtgagaagatgggtgggctgaatgagctcggccctctctgggccttagtgctggcatctatgagatgaggacatgcctgaagtcagcctggaattttgagcccaggttatacctggtaaatagaactcccaggtctccggatactcaccactaaaacaatagcacctcattgtttttgttttgttttgttttgttttttaattatactttaagttctagggtacatgtacacaatgtgcaggtttgttacataggtatacatgtgccatgttggtgtgctgcacccattaactcatcatttacattaggtatatctcctaatgctatccctcctccctccccacaccccacgacaggccccagtgtgtgatgttccccttcctgtgtccaagtgttctcattgttcaattcccacctacgagtgagaacacattgtttttaaccctccccagcagcttctttaacccctccatttcccttttggcggagacccttgtcatcactcctctctaccaccagtgctctcccctcctgcactgtcccaggcttcctcattcttcccttgcaggtccttatccaacatggctcacaattcctgggaagccacaaggaaaccaaattctagtagcaactcagagtcagcattcattagcaggtcacagggccataaggatgccaagaaggaatttgtccctctccttgtcctgacaaaaggcataagtagaagaaaattgttaggtttggttatgacctttgacattctctctttgacatcctccctttctgcacccctcttccacctgtcagggcacctagggctccccgggtccccacaagtgtctgccctaaggcccaccaggctttcttgcagcctgtcccacatctgggtgtcactgccttcctctgaatcaccctcctctcaaaccagccgccagcgagcccagcccagcccagctagtgccctaccacacccgcccccaggataattaacacccagccacccagcatcggacctctacacttgagcaaaatgtatattttaaaggcaaattctcacgcctgtaatcccagcactttgggaggccaaggcgggcggatcacgaggtcaggagattgagaccatcctggctaacacggtgaaaccccgtctctactaaaaatacaaaaaattagccaggtgtggtggcacacacctgtaatcccagctactagggaggctgaggcaggagaatcacttgaactcaggaggcggaggttgcactgagccgagatcgtgccactgcactccaacctgggcgacaaagcaagactctgtcaaaaaacaaacaaacaaaataaaggctaagtaactgtaatcaagtaactatttattatttatttattttagtgtatccacaggttgtgcagccatcaacactatctaattctataacattttcgttaccccagagaaacttgtaccccttagcaatgactccccatttcttccccccaaccaaccccagccccagccccagcccctgggaatccctaatatactttgttttgttttttgttggtggtgtttgagacaggatctcactctgtcacccaggctggagcgcagtatcatgatctcagctcactgtaacctccacctcccgggctcaagcgatcctcccacctcagcctccccagtagcttgggcctacaggtgtgcaccaccacacccagctaatttttgtattttttgtagagacggggtttcaccatgttggccaggctggtctcaaactcctgagctcaagcaatccacccacctcaacctcccaaagtgctgggattacaggcgtaagccactgcacctggctattttctttctttcttttcttttttttttttttttgagacggagtttcactctgttgcccaggctggagtgcagtggcgtgatctcggctcactgcaacttccacctcccgggttcaagcaattccctgcctcacccggctattttatatttgttgatctgctgctggttatgcctgtgagccaaatttgtacaaattcttaagctttacaatcatgcgtgcctctctgtacgtatattatactttaattaaaagttattaaagtattggggccgagcacagtggctcacgcctgtaatcccaacactttgggaggctgaggctggtgcatcacctgaggtcaggagtttaataccagcctggccaatacagtaaaaccccgtctctactaaaaatacaaaaaattagccgggtgtggtggcacacacctgtaatcccagctacttgggaggctgaggcaggagaattgcttgaacccgggaggcagaggttgcaacgagccaaggtcacgccattgcactccagcctcggcaacaagagcgagactccatctcaaaaaaataaataaaaaataaaaaatgtatcagggagtacaagagaaagtcatataagctctttctacttttcatggtttctatgtctgaacccatgaatcttccttctgaaaggtccaactttcttctttaataacaataataatggcaaaggcattgggggaccgtgagcaaagggcaggcctttgcaggggtgggaatggaaagggaagcacgtccctagaggtgggcctgggatgggggttgggggatgaagcaagtggaccttgaaggtctccacaggtctgagtgtcctatgctccctgggcctctcttcccccaggtcttctcgttcgcaactgcaccatcactgccaatgctgagtgtgcctgtcgcaatggctggcagtgcagggacaaggagtgcaccgagtgtgatcctcttccaaacccttcgctgaccgctcggtcgtctcaggccctgagcccacaccctcagcccacccacttaccttatgtcagtggtaagttccaggcaactctctgtgccatcacgtggggtagcggtgataccccaaccagtactccccactcctacccctagataaggtcagcctgtttctgccttcccatcccatccagcacctctcaggccttcagatgtgccctatggggtcccctgctgctactcattctgtctctgtttttccagagatgctggaggccaggacagctgggcacatgcagactctggctgacttcaggcagctgcctgcccggactctctctacccactggccacgtgagttttctccttaatccccaccgctagagagaatgcatacacgaggggccaggagggaagccagacagaaagctcctaggattagggataagaggaggggaaaaagcagagtccactgtttaggagaggagttggccaacggtggcgggtgggatagaataaggtgggggaaaggggagaggcaaggtgacaggagggctgggctgagggagccaagggctagaccctcccctaacccctgtgtgtcccctcctattacagcccaaagatccctgtgcagctccgattttattcgcatccttgtgatcttctctggaatgttccttgttttcaccctggccggggccctgttcctccatcaacgaaggaaatatagatcaagtaagagacagaacacaggcctccggtcctgcccctgcaccacaccccactggctcaaccccactgcccacgcctggaatctcactgaaacccaccagctccacttcaccagccttggtcctaccccttctctccccttagctggcgtgctcctgacacccctcccccaagcgcacccgcctctacccatctccttctcccgtctccccctgcccccactgctggccaagactcatcggatctccttctgcagacaaaggagaaagtcctgtggagcctgcagagccttgtcgttacagctgccccagggaggaggagggcagcaccatccccatccaggaggattaccgaaaaccggagcctgcctgctccccctgagccagcacctgcgggagctgcactacagccctggcctccacccccaccccgccgaccatccaagggagagtgagacctggcagccacaactgcagtcccatcctcttgtcagggccctttcctgtgtacacgtgacagagtgccttttcgagactggcagggacgaggacaaatatggatgaggtggagagtgggaagcaggagcccagccagctgcgcctgcgctgcaggagggcgggggctctggttgtaaaacacacttcctgctgcgaaagacccacatgctacaagacgggcaaaataaagtgacagatgaccaccctgca

SEQ ID NO: 5 - DNA, 2667 bp, Homo sapiens
ctgggcccagcctatagtcagcggtgtctatgggcatggatctggacggggaaaaggacaaagcagcctccatccacagttcattccgggaccaggcccttgcaggcacgcgctgggctcctgtgggaagacactaagggccccaggacagacctcctctccgggcatctgggttcctagatggcagaggtggcagagtggggtgggatggcccaattgggagctttagcttccggcaaagagctgagcacagtacatcttcaatgtgtaagattctcctgggagaccagggcccagctggtggtgagctgggggaagtgggtgatactgccgtgggaggagccacctggccctctggggaagtgcactcgctgtctgcagcgcccaggcctgggtagctgggtgggggctggggggccatctgtgctcagggtgcctgcacctgggccttctctgccctgggccaagcctgcccgagcctctctgtcctctgcctgcccagctggacatctctgggcctctctggagaccagtggggtgggctgtgggggcgtcatattgccctggcttggcatccctcttgtggctgtacccctcccagcagccccaggactagcaagtccccgagatgggggtggggacagtggttgatgccaaaggttgtgggggcaggggcggggcaggagcaggaaggtcccctgagttccctcaccttgggcagagataaaaggagcacagttccaggcggggctgagctagggcgtagctgtgatttcaggggcacctctggcggctgccgtgatttgagaatctcgggtctcttggctgactgatcctgggagactgtggatgaataatgctggtgagtgtctggccctcggggaggcccaagctggggacagctaggcaacctgggaggggaggacgggggtggcgctgagtggggcatgtcggtgtccctgagcccatgggaggggaggacgggggtggcgctgagtggggcatgtgggtgtccctgagcccatgggaggggaggacggggttggcgctgagtggggcgtgtggatgtccctgagcccaagtgacagagcctcccctccctcgtgctgctgcagggcacggccccacccggaggctgcgaggcttgggggtcctggccggggtggctctgctcgctgccctctggctcctgtggctgctggggtcagcccctcggggtaccccggcaccccagcccacgatcaccatccttgtctggcactggcccttcactgaccagcccccagagctgcccagcgacacctgcacccgctacggcatcgcccgctgccacctgagtgccaaccgaagcctgctggccagcgccgacgccgtggtcttccaccaccgcgagctgcagacccggcggtcccacctgcccctggcccagcggccgcgagggcagccctgggtgtgggcctccatggagtctcctagccacacccacggcctcagccacctccgaggcatcttcaactgggtgctgagctaccggcgcgactcggacatctttgtgccctatggccgcctggagccccactgggggccctcgccaccgctgccagccaagagcagggtggccgcctgggtggtcagcaacttccaggagcggcagctgcgtgccaggctgtaccggcagctggcgcctcatctgcgggtggatgtctttggccgtgccaatggacggccactgtgcgccagctgcctggtgcccaccgtggcccagtaccgcttctacctgtcctttgagaactctcagcaccgcgactacattacggagaaattctggcgcaacgcactggtggctggcactgtgccagtggtgctggggcccccacgggccacctatgaggccttcgtgccggctgacgccttcgtgcatgtggatgactttggctcagcccgagagctggcggctttcctcactggcatgaatgagagccgataccaacgcttctttgcctggcgtgacaggctccgcgtgcgactgttcaccgactggcgggaacgtttctgtgccatctgtgaccgctacccacacctaccccgcagccaagtctatgaggaccttgagggttggtttcaggcctgagatccgctggccgggggaggtgggtgtgggtggaagggctgggtgtcgaaatcaaaccaccaggcatccggcccttaccggcaagcagcgggctaacgggaggctgggcacagaggtcaggaagcaggggtggggggtgcaggtgggcactggagcatgcagaggaggtgagagtgggagggaggtaacgggtgcctgctgcggcagacgggaggggaaaggctgccgaggaccctccccaccctgaacaaatcttgggtgggtgaaggcctggctggaagagggtgaaaggcagggcccttggggctggggggcaccccagcctgaagtttgtgggggccaaacctgggaccccgagcttcctcggtagcagaggccctgtggtccccgagacacaggcacgggtccctgccacgtccatagttctgaggtccctgtgtgtaggctggggcggggcccaggagaccacggggagcaaaccagcttgttctgggctcagggagggagggcggtggacaataaacatctgagcagtg

SEQ ID NO: 6 - DNA, 29223 bp, Homo sapiens
cgcgcaggcgcactgccgtcgggcgggcctagcgggcgcggtcattgtcctggcagagcggcgagccggtgagtgtggctgcggggtcgcgcccaccctctacctgtgccgggggccggaacctggccccggggagggcgcggcctcggggagacggcgtgcaggcccaggtacggggagtgcagggctgggtgctggtccagggcgtgcgggcgcaggagagggcgtgcaggccgggaccgaggtgcgcctggagaggctgagcggccgaggagaggctgaggggaagctgaggggctaaggagaggctgactggaggctgaggggctgaggagaggccggggccagggagggagaggcgtgagtgggttggaggtaggaaagttgcatgaacacgagggccatcctggggggaaggtggcctgtgtgagagacaggcagtgcatatcatcctgaggatgaggctgtgtctttgtggatattgtgaatgtgtctgtgtgtgtgtctgtgtgggtctgtatgtgtgtgtgagacagattgtgtcgtcctgagggtatggctgtgtctctggatattgtgattgtgtgtgtgtgtttgtgtgtgtgtgtgtgtgtgtgtgtgtgtgtgtgtatgagacagagagagaaactgcgtgtcgtccagaggctgggtctgtgaatgaatgtgaatgtgtccatgtatgtccgtgtgggtcatgtgtggtagcgtgtgtgtgtgtgtgtcccacttcttcagagtcttggtctctctgtggagctgtgtctctccaggtctctgcctatgcatgtgtggtgatatctctgagtgactgcctgtgtccttgtctttggtgttgtgggtgtgtcagccttgatctctgtccatgagtgtctctgtgggagggtgccctctgggtgtccactatgtctgctctttccatgcatgtctcttggcatgagtgtagggctgtgtctttccaggggccagtcctgtctggatctttcctatctctgtgtgtccacctgtgtctagagtatttcttgatgtttgcgtgtgactctgcaggggtgggtgcgtctgggtgtgcctcttccaaagactatatgcctggacaagggagcctagcagagccactaccttctcaccctacgcttctcctagtctgcctgcccacagttccctggctttttcctgcccatagaaggctctggaggcgtaggggcctgggagtgacaggggccgggtggaggaggggaaaaggaaggctgtttcttctgcctcccacaggatcttcttaaagtgggatcagactcccaaagggtctctgtgccctactctgttctgaccaaggagaggttgatttgttcagggaatgtgtatgcagccagtgctggccatttatagatgtcccagtaactctgaggtagagaccatcatcatccttatcttacagatggggaaactgagtctcagactaagtgactcacccaaggctacctcaggcatccaggttccagagcccccacaattaaccaccagacaaatgggagatcccttttttccctttccgctcagctgacacaaggttgcaggattttccccgagggaatccccgcttggaaacaatggaaatggaagaaaggaaggaaatgccaaaaagctcagaggaagaagaatccagatctaaggccaaactgggttcaacagccactggccatactcttgggcaagtcacttccagggccgctgcatgatttttaagggtactttgccttcatgggccccttgctccattgtttttttaaagcactaaaaattacattttgttatttcattaataggaagacaaatgtaatctaggctggattagatattttcttatgattttaaaagaaattaagaccttcctatgggcccctaaaggtttcatgggccccatgctctgtgcctactgggtaagtgggctctggtcactgctgtgatctggcaaaatgggccagtgttcttgacctcacaggacaggggtgaaagagaccactatctgcaaggaatttttttttatattaaattgtgtttcaaaaatgttgatggtaatatgaagtttctacacccagggaaacaattcaaaggaagagaaagaaaaaataattaataacttctacccccttctcattcccactccatgccctccagacaccaacccagcctcattccacagccttccccaggctggaagatgctgtacagatgtgtccacatccacatgttttggtttgttttttcacaaaggggctaaaggtatgcataaaactgggtaacttgcttttctcacttagtgaaaccacagacatgtcaacagatgcagaactaactctgcttcgcagaggcgacctgatacttcatactatggagaccctaccctcgatttgattcctttagtaatgtttattaattttgttttcagggtttttttttgcctctagaaacaatgctgccataaatatctttttttcctatatgtaacttttacacggagcttttattggtgtgggcagattcccaggaacagggttgctgggttatgggatttgtgtattgccagctcactttccagaaaaatgttgagcgactcacattccctcaccagtgtgtgagagggcctgttcctttcaatcctggccagcactagaagttagctcatctgttcattcagcttgatgtctaagtgcctcctgtgtgttagacgttgtcctagatgtcggaaatacaatctgaaagtgatcatccctgctccctgggggcttctgttctcatggagggaagacagatgacaaacttgaaaacaactattttaaaaaagacagttgtcaatagtggtttgtactgcaagaaaatagagggggagagagttgctgcttgaggtcaggtgattgggggtagaggacttctccaaggaggtgacgttggagctgaccaggaagcaggggtagtcatgggaagagcattccctccagagggaacagcagatgcagaggccaggaggcctggggccaagcatgggagaggggagtagaggagatggaaggggagaggccatcaggggcacatcataagggctatgtgggcagcagtgaagactttgagtgatttctaatggtgggggaagccaacgaagagttttgaagagttttagcccagaggacattttcactgagtgattacagttggccaggtgtggtgcccgggtacaggcattaagtggtaggaacccccagcccacacctttgtgatccttttgttctacaacagggcttctcaacctccacactactgacctttgggcctgatcattctttgttgtggggcctgtcgcgtgcatcgtacagtgtgtagcagcatccccagtctctaccaactaaacgcccatagcactcccctgccaaattatgacagtttggcaaatgtctctagacgttgacaaatgtctccgggggcagaattgttcccgattgagttccaaaggcttctgccaacttggccttatatatatgcccccctacaattaaaattacttttcacttgtggaagttggggccatttggcctaagaaaggctcttctttgtcttagtggttcttacgctttaagacgtgtcagaatcacctgggaaacttgcttagaaataccgattcaggggccctacccaggtagtttgattcagaggatctgaggtggggggcaggaatatatattctgagtgagattttaataagcatccccagtgattctggtactttgagaattggtgcaccagctacaagagcattgtgttggagaggattgaggcttttctgggtgatcttgaagggttggagatgtagagaggcatgtttctgtttatagcagaagaaaaactcatttccagtcagaggtgttggtggcacgggtagtgagcccccatcacgggagaagccaggactgagccagcatgtctcagactccaagaatttgtcctcatctgtgtcatggatcctatttttttactttgccatttacttgatttggctcactgattttttttttgtttttaatttaaatcaacttagtttaaaagggtattctgtgtgactgctgtaaaagaagctgagttttgctgtaagaagggaaacaaactttaaaacaaattgaagtaaagccaggtagttctaatgagatattatggtcaccctaactttggggcctgaaccctgcttttctttttaattttaatttttaatttttctgggtgtgtagtgggtttatatatttatggagtacatgagatattttgatacgggcatacaatgtgtaataatcacatcaggataaatggggtatctgtcacctcaaggatttatcctttgtgttacaaacaatctgattacatttttagtgttttgtttttttttttttttgagatggagtctcgctctgtcacccaggctggagtgcagtgttgccatctcagctcactgcaagctccgcctcctgggttcatgccattctccttcctcagcctcccgagtagctgggattacaggcacctgccaccacacccggctaattttttgtatttttggtagagacggggtttcaccgtggtcttgatctcctgacctcgtgatccgcccgcctcggcctcccaaagtgctgggattacaggcatgagccactgcgcccggccagttatttttaaatgtatcattaaattattattgatcatagtcaccctgttgtgctgtcaaatagtaggtcttattcattctttgtgtgtgtgtttttttgtttttttggggtttgttttttttttttttttttgagatggagtctcgctctgttgccaggctggagtgcagtggtgcaatcttggctcactgcaaccctctgtatttttttttttttttttttttttgagacggagtctcgctctgtcgcccaggtcggactgcggactgcagtggcgcaatctcggctcactgcaagctccgcttcccgggttcacgccattctcctgcctcagcctcccgagtagctgggactacaggcgcccgccaccgcgcccggctaattttttgtatttttagtagagacggggtttcaccttgttagccaggatggtctcgatctcctgacctcatgatccacccgcctcggcctcccaaagtgctgggattacaggcgtgagccaccgcgcccggccctctgtatttttttaataccaattagccatccccacattccccccacccttccactacccttcccagcctcaggtttcttcatcattctagtctctatctccatgagtttgttttaatttttagctcacacaagtgagaacttgcaaagtttgtctttctatgcctggcttatttcacttaacataatgacctccagttttatccatgttgttgcaaatcacaggatcttattctcctgcttttcttttgtttcaaggggcgagtgatgggttgcagggatgttaagatatctctccacttgagactttatcctgagcttgtcaggagaactggaggagaattgaatcaagatgcatttctctaggcgaatctggctctgagagcccctgggtggaagttccttacactcatatctgctagttgaacctcatggtaaccccatgaagtctgggggaagtgcccaaagaggccacaggtggttctggggcatctcagggggcctcagtccagcactcacactcaaggagggatccgggcagggccattgggagaaggcagggtgtccggtggccctcagcagcctgcgggaatgtgtgtgagtgtatgtgtgttaaccatatctataggagtgtacatgggagtgcatctgtgaggcattgtagcctggaggctaagctgtggacccagacatactctgcctgactccagtcccagctctgtaatcttgagcaagtggtttaatctcctcgggcctcagcctcctcatctgtgaaatgggtaggtagaagtagtacctaccttccaggatggttggaagatcaagtgatatacattcaagttccctacatgcagtaagccctctaaatactcactgttgatgtatgtgtatgtgtgtctatctgtctgtctctgcttgtctctcagtgggtgtgtgtctgtcctgtctacatttgtgaggccagcctaggcctggtctctcagcatgcctccctctttcttctccctacagcactgttggtcaccgcaggcctgtcttcctattcaccgtgggcagcagagggatggctgctcagctgctgactgatgaggcactggtgagtcatgttgccctgtcactctcctttccaaaggctggatcctgccttgggtgagcctctgctgctcgaaccctctccaaggcccccagtcccatcttctggggctgtgtctgccctgatgaagagggctgtgcttatagatgatgctgaccctggctgtggggtcagttgtaggggacagggaagctttggaatggccaaactagctctctggactcttaggagacacaggtgggcacctgtgggaagtggtggtttagacatgtgacattgagtgaaaacttgcgcaggaccatgctggatgtgtgacctttaaaatgggcaaacacactaaatgcttcttgtgaatgtgaatgcccacatgtgtgatgaaagtacaaaagcttatgggaatgaggcccacaaattcacccatgattttaccccaaaagataatcactctggaatgtttgagtctggctaagcaattttaatgttaaagattgctttttcatcagagatttcatcctgagcatttctccacatcattaaaaactcctttgtaacgtccatcttaatgaccccataaaagtgttgttcagtggccataccctggtttacttaatggttcctctgttgttggacctttattggtttccaagtattctttttttggttataaacagtgtcatgagggacactgggcacaaatctttctttgtgtcttatatgatttctttaggagtgattccttgaagaggaagattgggttgggtatttttgaggtattttgatattatttccacatcagttacggcggtatgtattcccaccagcatgtctgagcgggtctctgatgatttatatggctgttgtcaggcatttattctgcatgttggatatatttagattggtgcaatattgcaccatgataataaatgataaatggatataaatgacaaatgctataaaccatgatgagcctgataggggacaaatggtgccacgtgatttatttctgagtagcattgtttgtattattagtgaagttcaagtcttagaaaatgtttactagccatttctgtgggcagggaaatgatccatcttgtgctttagcagtctacaggaatctgagtatgctttaaagactttacagaagcaaatgtgtgtgtgtaaatatttgtggcaaatattcttcccagatttgctttttgtttctttattttactttattttttctgtataaaagcatttcatatttttaaaatcaaatctgttggtttctcccactgtggtgtctttcttcatctttaagctgtgaaagggtttctccatccacaggtcacatagcagctatattttcttccttttcaccatttgtcatttgaatgttaacaatgaacttttgaatctacctgtaattgattttgctatataaatgtgtcagtagacttatttgggagctttggtttattctgtcttcatttgtttggtacctttgttgaggtacacatcacgtatcacaaagtgtacaattcactgattttgggtacattcatagagtcgcgttaaccatcaccacagtccatttcagaatattttcatcatcctgaaaaagagccgagtacccattggcactcatttccattttcccccatcagtccacggcccctggcaaccagtaatcagctttctgtctctatgaatttgactgttctggacatttcaaataaatggaatcatacatggtgtggtcttttgtgactggcttctttcactcagcataatatttgcaaggttcaaccatgtggtagcacatatagagcttcattcctttttttgactgaataatattccagtgtgtgtttctacatattttatttatcctttcatcagttgatggacatttgggttgtttccactttttggctattatgaataatgctgctatgaatattcatgtataagtctttgaacatatgttctcagttctcttaggtgtgtacctggaagtggaatgttgggtcatatggttaactctgttgaaccagtaaaggaaccaccagactgttttcctaagcgattgcaccatgatgccttcatttttgtctcatctgtgattcttgccttgaattcttcttttacctacattacttagaaagatttgttgattgtttttatttcaacagggttgggagttttggtttaagttttttttttttttaattactactagtgtaattacattcaatttttaaaaaaaattgagcctgtctggtttcagcgttttccctgtggtgaaatggtttgtgtcattagacaggaaaccgaaaaagatggagtactagaaaaaggggccttggacacgtacgtgcagagaactcagaggccctttgttagcacttctgtcccaacacgatgggctcccagacctggaaggctgtgttctgtgtctcagcacaaccctggtgccagtctgggcttggtgcctggagactgctcagtgaatagttgagtgaattaggtgggtgtacttagggaagacttccagaaggaattgttgtattacaattttgtaaaataaataaatataggtgtgagagggaacttttggaggtaatggatccgtttatggccttgatggtggtgatggttccacgggtgtatatgcatctgcaaactcatcaagttatgtatattattaaatatgcacagctttttatatatcagtcacacctcaatcaagtagtttaaatttttagaaaaggaggaattattagctgggctggctgaaagatacattgggccaaaaggtcaaataatatcatataaggatctacagttgtacataagatatatattaaatatcaacattaaataatagcaagagtcgacatttactgagagcttcctccatcacacgaggcactgtgtttggaccatatttgtacacatttaaccttacgaccctgtggagggggacattgttatcaggaagcctgcctctcatatgaggcttagaaagagaaagacagttgtccaaggaaacacagctcatgaggggcagagccaggattccgttgcagagtgtggttcctgagcctacactctgaaccaccagcccaactgctttctatcaaaggtgacccctcaggcagaggaggctatcttgagcccaagccccagaagggcaccctaggaccatagagggactagccagcgggggtgaggcctccccttgggattcagttggtggtggggacactcagtatgctggagagagccagtgagctctgagtgtcagtaacaatagctggcacttattgagtgcctgctgtatgctatgcattaccattctgagtgtcttacataaataagtgggcaggtggggcctgtagcaaattggagctttcttgccccatcaaagggtcagccaccactcagctccagcctagagtggccagatattctgctgtttaaagagaaactagaaattcattttcttggtaaattgtggatgtgtttttcatgtgagtaacaattaaaaacaattttgaaacccccataggagcaaaatagaaatgtgtacagctggcttcaggcccaggtacatctcatatgctctgtgtgctcagaactcccgttctttccttgtgccttgggggttgtaccactgaatcagttcagaacagcaggtccctctgtaggacacaataggtctctcattactcacatgccatgctgtgaggaagcccaagcagccacaaggaaaagtgatgtggagaaaaagagatgcccaccaaggcctcagctgtgccatccataccagctcaagagacagacttgtaaacaaagaagctagcagactactctagcccagctgccatccaactgccaccacacaagagatgccaggcacgaactgcccagctgagcccatcaaccccaaaatagtaataaattgttgtttttgagccattaagttctgagatggctgctacccagcaaaatataactggatcagaaatttaatctgtggccatggctcaagatcttcatgtggcagagtcatgcatggatgatgtgatcagccagcaataatgtgagacgtgcaggccttcatcacactagggaggaggtcgactgtcaagcaccatctctggaagtggcttcaggatcgcttgtgatctgtctggaagagaagcgccagctgggacactctgtgatatttatccaactgtcttctttataggcaaaagacgtgccatccatctcagggtctgatccaaactaaactgctccttggctgtgatgccagctagattggtattatacatggatgaggccatctaatgttggggctgagagttgaactgactaggtttaaaatgctgccactcccatctgtgtgacctcttgtgcctcagtctccccctttgtaaaagaaatgagctcataaaagtgcctacatagtagggttcttttgaagattaagtgagatggtgtgtgcagtgggcttagaacaatacctggcatgtagtatgtgcttaatgaacattagttatttttatcattatttactaatgaattagtatggaagaaacctggtgccaataccatgtctgtcttattcacagttgtatgcccagtgcctggtgcatggcaggcacttaataaatattcgtcaaatgaatacatgaaagggtgaagtatcactctgtgtgtttccaggaaccatcaatgaacatatttagaatatgttagaatatgtattagataccattgatctagaattcctgtttagggggtaaaaattcaaccatacttttctggtagcccggaaaattataaattaatcagttaaatttccgatccagttatattttgctgggtagtaaccatctcagaacttaatggctcaaaaactacaatttattactattttggggttgatgggctcagctgggcagttcgtgcctggcatctcttgtgtggtggctgttggatggcagctgggctagagtagtctgctggcttctttgctcacatgtctgtctcttgctgtggtatggatggcaccgctgaggccttggtgggcatcttttttttttccacatggattttccttgtggctgcttgggcttcctcacagcatggcatgtgagtaatgagacataatgagacacctgttgtgatgactggcttctcccagagcaagtgttccaggaggctgaggcaggagctggaagtcttctgtgatctagcctgagagtcccagaacattacctctgccagattctattggtcaagcaggtccctaaggccagcccacattcaaggatgggggaactagactccactagtgaaggatttgaggccattttcaacaagtctacccacttactattgtctaccaaagctgacttatattgaaagagacagtgaaaatgggtaatttgatccagcaaaatataactgtatcagaaatttaactggtgttttaatttacaattttctgggctaccagaaaagcatggttgaatttttaccccctaaacaggaattctagatcaatggtatctaatacgtattctgatatattctaaatatgttcattgatggttcttggaaaggtacctgcattttccttgcttgggcagcaggactgggcatttctgattcacagccctgagtatgataattgagagtatgagagttgtatgctcattttgggcaaatactcaaagcaggtagctttttatgtgtcttcctatcacatacgattgctttcttgggcctgttcaaggtaccatgtaagaaatttaaggattcagtcatttgttgtacaaacatttattgagtacctactaagtgccaggcgctgttctagggtctgaggattctgtggtggcccaggcagacacaacttcacaaccccccatgacgtagatgctgttatccccttttaacagaggaagaaactgaagcctgcagaggttaggtaattgaagatgttcactttcatacattcacatagctagaaaatggccaagccagggtttgataacaggtctttgtacttcccagacatgcccttaagacactgcactgtctttcaaaaaacaaacaaacaaacaaaaacactcacccccctgtattacttgtggctgtgtaacaagttacccccaaactcagttgcttaaagcaacaattatttactattttacacagtttctgagggtcaggaatggggcagtggcatggctgtggctcaagatcttcagtcttctcagggcttcccaggctgcagaatcccttctgagagcctcacacagtggttggtggtgggatgccttaactccttactgacattggtgggaggcttcagctgctggtcagatgggcctctccaaaggactctgcagggcagctggcttcctccaaagtgagtaatccaagggaaaaagagggagtgtgcccaggaccaaagctatgatctttataacctttttgtctttttttttccccctaaatttcttattgtgctaaaatacacataacataaaatttgccatcttaaccatttttaagtgtgcagttgagtggcattaaatgcattcctaatgtgcagcgccaccaccatccatctccagaactctttgatcttgtaaaactgaaactctgcagccattaaacaaacactttccatccccctcccctccgcccctggcagctgccattccacaagtctctataaatttgacttgatacttcatttaaatcatggaatcgtgcagtagttttacttctgtgtctggcttatttcgctgagcataatgtccccaaggttcacccttgtagcatgtgtcagaattttttttttttaaaggcggaataatatcccattgtatgcatagactgcattttgcttatccactcgtgcttacgtacacttgggttgcttccaccttttggcgattgtgaatagtgagtgtgcatataacctttccttggaagtgacaccacactaacctctgctgtatgttgttgatcacacagaatcaccctggcacagtgaaggggctacataaggctgtggataccaggaactggggatcattcggggctgtcttggaggctgccaacacacacacacacacatacacataaaacatgaaaatattcacagtgtcactcctctgatacagctgctgttcacattttgacacatttccttccatctttttcctgtgtattgttttcatgtggttgagataaaatggttatttagaattctggaaacccagaagcaactctacatggaaaagctctgcataatcttgtaatgaaaatagctatgtaattggccatgggggtaggctattatttaatgaatcccatgacatggatgttatggttgtccaaagacttgcccatataaataaaatggagtggacatctttgtgcatgaagctttgcccaatttttggattatcttgttgggatagatttccagaagtaaaatgtctgaacattttaaacacataaaatgtgtaatattaaccttttaattgaagaaacaataggtaaaacgcacctatttgaaaattagtaaactgggaaaatgaattctcccacttcccctccccatcctgaaactactggcatcacctgctcttaccagattctattttggttaagagctttattgaggtataattcacgtatcgtaaaatccatccatataaagtagacacattaatatccagtgctttttagtttatttacagttatgcaaccatcaccacaatattttagaaaatttttaccactccaaaaagaaaccccatacccattggcagtcactccccatttctctccaacccaccctcacccctaggcaaccacacatctaccttcattctattttgcctattccggacattgtatataaatgaggcatacgatatggattttgcctgtcccggacattgtgtataaatgaggcatacgatacagattttgcctgttccggacattgtccataaatgaggcatacgatatggattttgcctgttctggacattgtacataaatgagccatacgatatggattttgcctgttctggacattgtacataaatgaggcatacgatatggattttgcctgtcccggacgttgcatataaatgaggcatacgatatggattttgcctgttccggacattgtacataaatgaggcatacggtatggattttgcctgttctggacattgtacataaatgaggcatacgatatggattttgcctattccggacattgtgtacaaatgaggcatacgatatggtcttctgtgtccggcatctttcacttggtgtcatgttttccaggttccttcatgttgcagcgtgtgtcagagctgtcgtgtggacgaaccacattgtttatccattcgtcaggagatggacatttgagtcgtttccactttgggactattgcgagtaacattgctatgagcatcagtgtatagtttttgtgtggcactctgttttcatttttcttagatatctaccaagaatggaagtgctaggtcataaggtaactctgtgtttattcacttgaggaaatgccagactgtcttccaaagcagctgaaccattttacatccccaccagctgtgcattcttaccagtttcttgcattcacttccataaagaggtctgcgcctgtataagcacatatgtgtaaatttccctttattatttcctcttatggaaatgttaacaaactagacacactgttctgggcattgatctgttttttcatgtaacagtatattcgggagatcattctgcacctgcagctaaggggctgccccctttttttttgttatggctgtgtgtattccactgtggtggattcactgacctgatttatccaaacccctactgatggccatttgggatgtgttcagtctttttacttcttcatctgatactgtaataaatatccttacacatctatgtttttgcatgtgtattaatatatctgaattagtctaaagtgttcaaaagaatttgaatattagttttgatagattttgctaaatgccactccatagacattgtcccagtctgttctcctatcaggagtgtcagagaggaatgtttcagtatttgagttggagagagtatttcctttagagaggaatgttgttgcagtatttgtccttttgtgactggcatatttcatggagcagaatgtcctcaaggttcacccatgttgtagcatgtgtcagaatttctttccttattaagtctgaatgagatttcattgtatatagagaccacattttcttcttctttttgtctgttagtgtacacttgttgcttccaccttttgtctattgtgaatagtgctgttaggaacatgggtgtgcaaatacagagtgcacctgtaaaattctaaattagattctgtccctctcctgctcagaccttccaaagaatgaataagaaggagccagcttaggccagacctgaaggaagagcattttgggcagaagaaacggctagtgcaagttccctgggggatattcgaggagagaaggcaggctggcagggctggagcagagcacaaggggcagagcagttgtggggacagtgtgggggtcagaggtcagagtcaggactacatgtatgggcaccacaagttttcattacctgccgctctgggtggttcgtgagaggcagcagcctgcaaggatgaggactcgggctctggagacagcccatgaggttcaaagcctggctgtcccacgcagtagctgtgtgctttggtccaggaacctaccctgtctgtgccttggtttcttttatctctaccttccagcctccctccagtgccccctattgacagagcttcacagggagtagctgctaaggcagaaacatcacgggatcgcagagtcaaagcccgcagatctctgtgcagagtgtggaaggggggcttttggggatgaaagacaatcacttaatcacttttaaacaggcatactatattataatgttagcacctgactcgtaggtctgttttaagttaataatgactgaatcaatatgtgccagcacggtatctatttctcaaggctgctgtaaataagtaccacagactgtgcagcttaaacaaaggacatttattctgtcacagttctggaggctggaagtccctgatcaaagtatccacaggaccacgctccctctgaaggctcaagggaaggctctgttccaggcctgtctcccacctgctggcaagttccctgacttgtggcagcataactccattcttcacacagccttgtccctgtgtacatgtctctctctgtccatgtttttcctttctgaaatgcaaattaaaaccacaacaccaccttaccccagccaggatggccattattaaaaagtcaaaaaacaatagattggcgtggatgtggtgaaaagggaatgcttatacactgctgctgggaatataaattagtacaacttctttggaaaacagtattgaggtttctcaaagaactaaaagtagatctcccatttgatccagcaatctcactacttggtgtcaacgcaaaggaaaataagtatttatatcaaaaagacacctgcacgtgtatgtttattgcagcacgattcacaattgcaaatatatgcagtcaacctaagtgcccatcaaccaatgaataaggaaagtgcccatcaacccatagataaagaaaatgtgatacacacacatataatatatatgtatatcacatttatacacatacacacatacatacacacacataccatggaatactactcagccataaaaaataatgaaataatgtcttttacagcaacttagatggaactagaggccattatcataagttaagtaactcaggaatggaaaaccaaatgctgtgtgttctcacttatgagtgggagctaagcgatggatatacagaggcatactgagtgttataatagactttggaaactcagaagcgggcaaggtggcaggggggtgaggggtgaaaaactacatattgggtacaatgtacactattcaggtgatgggtgcactaaaatcccagactttaccactgtacatttcatccctgtaaccaaaaattacctgtacccctaaagctattgagattttaaaaattgaaaaacaaatttcccttttctataaggacaccagtcctgttggattagggccccctacccccactccaggatgacctcattttaactgatttcatctgcagcagccctgtttccaaataaggtcatgttcttgagaccttgaaggttgggacatcagcatatgaattggaggggctcataattcaacccataccaaccacttagagtagtacctggcacatagcagctgctgcataatgactggtgttgcctacctcatcatcaccatccacactgctccgccaggttctttcagtccacaggcttgtgacatctaccacaaagtgctgctccttccacgtggacttctctccactccccagcagtctcatctgccttttcaccttcgggtcttgatccaagctctcttccctacccagaatctcccactaaagacccaaccaccagttctcttcacagactactcaaagtcttcctgggcaccccccacagctggcattactcaggcacctggagacctttgttcataccttcatgattgattgcgtttaccaaattacgtgtctttgtctgcctctgccatgaggaactagttcttgaacattttgtgtctgtatcccagcactgggcttgctgcctggtgcttagtaggggctcagaaaagttagctgtgcccctggattccatctggggctctgcctctgctgtgctcctaatgcatttgttgattcactgggttagactcactttgccttcagttcctttccatctggttctcagatctgtgaccttctgttccagaatgtttcatatgggatttatttctctatcagagtgccaacccaatataactagacacagagaaaactgtgagtgatccctttagaactctgcatcttattgaaatcacttcagctacatcccatctgcctcccctaaatcctcttggcttttctggccattcctccacgcctctgtaaggagggccctgcgatgagcggatgtgggtttcctcttacaggaatcagtgacgttcagggatgtgactgtggacttcacccaggaggagtggcagcagctggagcctgcccagaaggacctgtacagggatgtcatgctggagaactacaggaacctggtctcactgggtaaggggcagcttcgttgagttactcatcattggcccataacttcaggaccacaaataaattaaaaaaaaaaaaagatcaacagatctgactacatggaaagttttaaaatttgctctacttgaagctaaaaataaagttgatcacgatggtatgggaaataatatttctcacgtgttttacattcaaagggtcataattatgtaagcagctcctgggaataagaaaaagactaagcgaataatagaatggaccaaacttatgagctggtgattcatagatttagaaatacacaaagttaacactttataaaagttttttaaaccttactactggagacacacaaattgaggtactagcagtttttgcccatgaagtgcacaaagatgaaaaaagaataatagcccatattatgaggctgtagaggaaaggactctcattttaggagtataaagttgggacagctcttttggaggatagcttggccttatcagtcaaatattgaaggattccatttttagagatctgtcctttagaaattctcatgtaagtatgcaaagttttccatgggaagaaaaatcaaggaaaacgacctaaatgcccagctgtctaagactgactgaacgtatcaaggcctatcgatatgttggaaaccaggcagctcttcaaagctgaggactgtttgtaggcactgccatgaaaagatgtcccacaacatactgttaggttaaaacactcacttttgtaatcagagcgtggtcctatttctttaacagcttttctggaggtattattgacctgtaattaaccacgcatatataaagtgaagagtttgatgcattttgacatagtgcatacccaggaaaccatcaccatgatcaagataaaggacatatctatcatccccaagagattcctcatcctcctttattacccctctctccccttcctcaacccccatccccagggatcccctggtctgctttatgtcactgtggttgagtttacctgctctccagttttatatacatggaatcatacagtatgtacccttttttttttggtctggctttttttggtttgacttggcattattttgagattcacccatgtcattgcatgtctcatagttcatttatttttatctctgtgtattattccactgtatgtgtatgccacaatttgttcagccattcgcctggtgatcaacatttgggtcatttccagttctgggctattacaaataaagctgctgtgaacatttgtgaacagttctttgtgtagacatttgcttttccttctgttgagtggaaagtctggatcatgtgctacatgtatatttaacttgtttaagaaactgccaacctgttttccaaagtgattgtactatttcacatttccaccagcagcgcacaagcttcattctaattgctttatcttttaaatttagcctcccttgtaggtgtgtggtctcatcactgtgcttttcatttgatactgacacttgtaggtgtgtggtctcatcactgcgcttttcatttgatactgataatcttttcctgcgcttatttgatgtttgtatattctctttggtaaagtatctgttcaagtcttttcctgtttttttttttttttctgttgggttattattgaattttgaaagttcactatgtattctttaactatctagaagtccaatgcgctatccattgcgtcacagagccagaccactatgtattcttgatacaagattttctttagatatatgccgtgcaaatattacctcccattctgtggattgtgttttcactttcttgatggcattatttctgactctaaagtttttaattttgatgtagtgcgatgtatctattttttgttgttctcgttgcctgtatttttggtggtatatctaaacaatctaactcaaagccatgaagatttattcctgtgttttattctaaggttttagtggtttagctcttcactgaggtctttgatccattttgaattaatttttgtgagtgatgtaagaacggggctcaacatcattcctttgcatgtgaatatccaggtgccccagtgcaatttgttgaagagcagaagtttttaattcaatgaagtccagtttatcaattttttttggttttggtgtcatttgtaagaaatcttggcctatcccaaggcctcagaggttttcttctgtaagttatatagttttaggttttacattttgttctttgatccatttagagttgaattcttaatatgatgtaaagtattaatccaagtttattggggtatgttggggggacaaatgtatgtccagttgtccaacaccatttgttgaaaagaccactttctccaatcgcctttgcatttttatcaaaaatcacttgtccatacaagtgtgggtccaattctgaatcctgttctgtccatctgtttgtgtgcctttgcaccaataccaagcaatgtcatcctttcagatcttgcttttatgacttgtgcccagtctagaatgacattctcctcaagatcattctgggttttctgcccaaagccccatgaatgacaaggttttacagtctgattggtaggaaaaggcactgttcccagccctgtgtcagctccggtcactgttttcaaatcctttcagatgtttttttcctgtgttgggtagtttcctgacatgcacgttttgaccaatagtctgctaaatactggagggagttccttgcaggtcttcagaacactgtgcagctcattcctctctcatctgtcctgggaactctatctgccttggtctctcagctctgtctcctcaacttggggagttggccagactgtacctcaatttacctttcctttgtcagagcctggaaacttcccaggcagttagctggggcagttgtaggacccaccttgtttgattttcttctctcagggattttgcccttcattgcctgatattcaatgtcttcacaaccattgttttatatattttgttttaggctcaagggaatcttatcctttatactctgtcttggacaaaagccccatttgggggaaaaatgtgtgtgtgcatgtacaggcgttggaggggagtctaaaatataaaccaaactgttaactctggtgagtaagattacaggagacttccattttcttttgtttttttttgttttttttgagacagtcttgctctgttgcccaagctggagtgcagtggcatgatcagagctcactgcaacctccgcctccctggttaaagcgattctcctgcctcagcctcctaagtagctaggattacaggtgcctgccaccacacccagctaattcttgtatttttagtagacatagggtttcaccatgttggccaggctggtctcaaactcctgaccaagtgatctgcctgattcagcctcccaatatgctgagattacagagacttccattttctccattactgttttggtgtttgatgttttaaaaacaagtgtgaattactttctaatcagaaacaagcatagaaagacagaaaactgaaaaagtgtgaaggacgagatttagcaatgtgaaaaaagaatgcacctacatttgtatcaaaaggaatgaatagcgttttgcacattaacggcttttggcgaaagtgccctctgcagaagcttcggatgtctcccatgacagtggccatgccgtcagacttcctgctcttttgctgacctgactagagaaaaggtgtgatcgggtagttttaatctgggtggtgtggaactgtgttttcacagctgtcgtggttaagggctgagtgtttgctgtttgcagatgatctctactgcagggttttagcctgagaaagggaggtggcttcctcccctctgtccctctgctggtatgctgcccccagctctcctgatttctccaggtcatgttcactccaggagacttccagctgtattcacaaccaagactcctggtcctctccgatagctgccagctcatattccagagcatctcagactccatcagccccagacaaaattcaccatcacccctggagacagtcttctctccaccgagtctacaccccacactaccatctgtgccagcatctgggcattgtgccacaccctgactagggtctctaaaccacaatcattctcctgcatgaagtatttctcagttcttttcctctgagatgggaaaagtgatgcatggtaatatagccactcctcaggagccacagctcgggggccacactgccagggcttgaatcctgctgtgcctcaggtgtattgtgccctcgagtacatctctgactccattcttgtatctccgtttcctcatcagcaaaatgaggatggtcataactatctactactgtatgtaactcaagtatgattgtgagggtctccagagatccgtgcaaattgttcagcactgtgccaggcgtgttgccagtgctccatactcgcttatctggtaccttctgtgtgcaggctgtgtgaggagctggggggtgagcaaggcccttgcctctagtggagctgactcctgctgggggccgataataatcagatcaagggacaggcagagaaaaattgccacaggtcactgagtgttcataaagaagtgggcaggaggaccttccttccttacgtagggtggattgggaaggctcccgtggggttgtggggaaacaggcctgaaggataaggacgtccacggcaggtccacaggacagtggatgcagaggccctgaggcaggaagaacacacggacaagagggagagcatggtgatgagaaactgggagggagggtgggcaggggacgactcaggcaggcctgctgggtgctgagggccctgaggctgctggaggtcctggcatcattctcagtaccgtagggaggtcacgggagggttgatctgactcctcagaagaccgcactcccggaggagtggaggacgcattgcaggggtgagaatggggtggggaggacagagaggagctgctgtcgcatttcaggcaaggacccgtggtggccagccggctttttgtcagtggggaccgggagatttggtctgattcaggctgtttgcgcacagcaatgcttgccagcagtcaggacggtgggagggaaagggcaagtcaggatgtctgctaagtctctctaaaacaattttttaaattttatatttaaaactgtgaaaaatatatagagaacataaaatgtaccattttaaccacttataggagtacagttcagtggccttaaggacattgatgttgttgtgcagccatcaccgccatccatccccacagctcttttcatctcccgcaaatgaaaccctatccccattaaacaccaactcccacccactcctcagcccccggcatcctctgttctaccgtctgtctctgggaatccgacctccaggtaccgcagatgagtggaatcacatggcatccatcctttcatgtctgatttattttactaagtctctttgatgggctttgcttttttaaaaaatgtttttcatggggaaagtctgaaatcccaagtttcgtatcggatgtgttaggcttgggctatccagttgagatgctgggcttttttgaacagtttggacatagcccagaaagcaggtctgggctgaaggtgtatgtttgagcagcatcagcctgtggataacgtttagatccagactcactttgtgtggctttgaaggtccagtgtgattcaggagagtggtctcaaactcaggtggcctcaggaactaccaggtggatcatttatgtggaggagggggacagctgctgccccatgcaatgtcttgttgcccataagaatgaggctccacgtggccatatcttcatgttttttatgagctagcagccacatggacagcaacttttaaatgctgggaatgagtcccctgatgcagagtctagactccacctaggctagaaatcgaggtttagaaatgaacaggatacacgtggaaggtgattgaagctgtgggcacagaggtatttagccagggagggtggatgagcagagaaagagggtctgaacccaagctccacggaatgcctgccacccaagaactaggcagcgtgtgacgtagcaacagaagcaattgtgagaccccaagtcatgtgattattgtgggctcaagtgagcggtcctgtgtgtatgaacacttagtgctgaggctgatgagagggctggggtgcgggagggctggggccagccagggcaggtgcgtgatgagctagcgggagccggagccccagccaggggagaggatcttgcagccagcaaccctggggcagccataccagagaagtggcaaaggggcaggagaaatgcccgatttttctctcatttcacttccagtttcctgcctttggccaaacacacaggaagccagtgggcaaagtcagcatcctgagcacagggcaggtcagagaagggtggagaatagaaagtgggtcgaaggagtagagaataaccaacacatgccatataaatgctagctatttattatttctttattctttttcttcttttttcaatatttatttatttatttattttttaagagacagggtctcaccctgtcacccatgctggagtgcagtgacgtgatcatagctcactgcaacctcgaattcctgggctcaagtgatcctcccacctcagcctctcaagtagctgggacaataggcatgtgccaccatgcctggctaatttttaaaaaaaaatttagtagaggcgggggtggggggtctcactatgttgcccaggctggtctcaagcaatccttgcctcagcctcccaaagtgttgggattacaggcatgagccactgtgcctggccatcttattatttctgataaaaactgttgcttgaggagcacgactggttgtggatctgcaggatgaagtgaggaggccctgcaagtcagtagccggctgcagtcattcctactcaggtttgcagagcctgccctttgctccctgcaagcccagctcactactgcagtttctctccaggagtgcctgtcatccctcttctgaagggacatttgctctccctgttcacctcctgtgttgactctgcttcataaaccacattggcctcagttccatgcctccctcctccctccctctctgatccaaggttcttctttgctaactcgctctgtgccttgggcctcattggggtcggtttcatttgctccttcctgctgtggagcttcctcactcccagcatctttaactacatgtatttgcatcttctgtttttgtttttttcagactgggagactagacctgaaatgaaagagttggatccaaagaatgacatttcggaagacaagctctccgttgttggggaggccacggggggacccacgaggaatggtgccaggggtcctggctcagaaggagtgtgggaaccaggcagctggccagagaggccgcggggagatgcaggtgcagagtgggagccattgggaattccccaggggaacaaactcttagggggctcagtacccgcatgtcatgaactgaaggcatttgccaaccaaggctgtgtcctggtcccaccacggctggacgaccccacagaaaagggggcctgtccacccgtaaggcgtggcaagaacttctccagcacttcagacctcagtaagccccccatgccctgcgaggagaagaaaacctacgactgcagcgagtgtggcaaggcctttagccgaagctcgtccctgataaagcaccaaaggatccacacgggagaaaagccgtttgagtgtgacacctgtgggaagcacttcatcgagcgctcgtccctcaccatccaccagcgggtgcacacgggcgagaagccctatgcctgcggggactgcggcaaggccttcagccagcgcatgaacctcactgtgcaccagcgcacgcacacgggcgagaagccgtatgtgtgcgacgtgtgtggcaaggccttccggaagacttcctctctcacccagcacgagcggatccacacgggggagaagccctacgcgtgcggggactgcggcaaggccttcagccagaacatgcacctcatcgtgcaccagcgcacgcacaccggggagaagccgtacgtgtgccccgagtgcgggcgagccttcagccagaacatgcacctgaccgagcaccagcgcacgcacaccggggagaagccgtacgcctgcaaggagtgcggcaaggccttcaacaagagctcctcgctcaccctgcaccagaggaaccacaccggcgagaagccctacgtgtgcggcgagtgcggcaaggccttcagccagagctcctacctcatccagcaccagcgcttccacatcggcgtgaagccgttcgagtgcagcgagtgcggcaaggccttcagcaagaactcctcgctcacgcagcaccagcgcatccacaccggcgagaagccctacgagtgctacatctgcaagaagcacttcacggggcgctcgtccctcatcgtgcaccagatcgtgcacaccggggagaagccctacgtgtgcggcgagtgcggcaaggccttcagccagagcgcctacctcatcgagcaccagcggatccacaccggcgagaagccgtacaggtgcggccagtgcgggaagtccttcatcaagaactcctccctcactgtgcaccagcggatccacacgggcgagaagccctaccgatgcggcgagtgcgggaagaccttcagccgcaacacgaacctgacgcgccacctgcggattcacacctgagcgcctctgtgcagggctctcactggcggtgcccaggacggacgccagatggctgcgcgctttgtcagcagtgctgtgagaagttctcccctggggtggggactcggggtcaggggagctcaggaatgtggggttgtggaggggctggctgatcacacatgccccctccttactgagcctcagaaagcaagcccctcggtgtctgacgtatctggggacacttcaaggttcactgtagctgagccatggccgctggtaacagacatcagggttccagactagccctcttgagtaactgtcctagagctgggacaggtcacgcctgcctccacatctctgtttcttcagcgggaaagtggagctggtggaggggagggaggagacatctccctctttgtcagatacatcctggagtccagatgcagcttgtcaccatctgcattttctccgtgggttgggagcgtgagggccttcctatccctccacccaccgtttccctgcagtgcacgctggcagccaccaagctaggaagtggcaggagtttgccggttgtttgtgaggggaaaaatttttttttcagagttagcaaataacagtaactactgctttgaatgccaaagtttcttagagtggtctgttacgttttttaaaaataaaacttttaattaagggagactatgttattttaaacagtcttctgttttggccagttgtctggtcaaaatcggcttcagtgattgtgggaggggcaagaaggaaaagaaacagcagcaggtttgatattcagaaagaaatatgcatggattcaataagtatatacatctgagcacagattatttttatagtgatttttgcagctaaatgtgaaggcaactgtcttaagtcccttcctgctgctgtaacaaaagaccttagactgggtaatttataaacaatagaaatttgtcactcatggttctggatgctgggaagtccaagatcaaggctctggcagatttggtgtctgatggggtatgttcttcataggtagtgcttgtgtcttgatgtgtgtcttcacgtggttgtaaacggcagacttcctcaggccccttataagggtgctaatcccagtcacaagggccctgacctcatgacctcccaaaggtcctccctcttcatactgttacattggggatcaagtttccaatatgtgaatacagggaagcaccaacagaccatatcagtaacttcgagtgagtttcctaaggccgactgaagctctgtttacacataagagtgttccccaaagtgcactttctctggggccttttaggccatacttttaattttgttatttgatactactggttgctaatgttctggcatttccagttgttccacactccctgacactggtgtacacaaataaataatacagaaaaaaaattatatcagcaagcacattctgcaaataagaaaaacagccactcgggcacgtataaacaaggtggaccgtttttcaaattctggcagtcaagtgggcctcagggtgggtttgattcaggctctcatcattggagccatagctgtggttctctgtgatgctctggctctcccttcatacttcttaacatcatcctcaggctggcttcccacgtgggattgtggtggtttccagcagcgagtcttgatcagacattgctttagttgcatctgttgtgggaataaatgagaatatgtatgca

SEQ ID NO: 7 - DNA, 65487 bp, Homo sapiens
aggcagaagccggcggcgcgcggacagccagtcggcgccgcgcggagctggccgctggattggctgcaacactcgcgtgtcaggcggttgctaggctccggccgcgcgccccgcccttgcgctcagcgccctctcaccgcccggtacgtgctcgcgcgaaggctgcggcgcggcgctcgcgcctcttaggcttggcggtggcggcggcggcagcttcgcgccgaatccccggggagcggcggtggcggcgtcctggggccaggaggagcgaacacctgccgcggtcctcccgccggcgctgggtgagtgcaccgcccgccctatccgctgtgcctggctgcttgggcccccatccctgctgccggctgagccttccgcggaacacctgctgctgctcgctgttcggcccggggcggggacacggccgcggacgtccttgtgggtgaggaggcggtgccgcccgggcggagccgcccctttgctctgggtcccgcaggcaaaggctcggagcgttcggctgcaaggcccgggccgcgcgccgcggcgatgggccaggccttagctcggcccgcgctcccgggaacgtggagcctgcgccttggccgcggtcgtgagccgcctgcgggccgcctccctggcttccaataggggttgtggcccagttgggccggattccgactgtggggagtcgagccccgctagaggcagggaagggcaccgctgccgccactgctctgtcagagctgctcagagccttggtgggttccgtcatccttacttgagctcctttggaagcttgtttacttactaccttttcactttgtatttggcagacctggttcacctgcgagtgtatttggatagtgtctccacagaaaatgtcgtctcggcttggaatctttttgccataaattctaagttagtttcctacaaactcaactggtaacttaaaatgcatcctttaatctctataacttgaaaagttcttatttttgtaaatcgagttgcttcagaattagttttaatggtgacgatgaagttttgactggttgaggcaagagcctgggacagcaccttcatagcgcagagtctaacttaagattctagcctgctgcttccctaaataagcgagtagaagtgactcctggcatagaagccagactccgtgaagggaaggtggtgtttataggacataattccagataaagagctggatgtgctttcaggtgttttgcaaagtctggtgtagatggggtattgcagttttatcaggttctatgcttagttaagttcagagacattattttggaatgttcctgttctaaaaaagaattcaaccgtactacattttggaggcataaaaatccatagtttgagtatggagaagtttagttgaacttttgtgggttttttttgctgtgaactaaggaagaagagctcatggcctgtgtcctgtattttggagaaatcagatttcagtagggagttggatccatcatgtgaagaccctatgggatataaaagcttgtgctgacatgtgcttttgttaaaagaggcacagtgcaaatcctcactgttcttaaaaattgattttgcaaaatgcatttattcatttgaacaaatattttgattcactacctgccaaattctgtggtagatcctagggacccatgtaaaagagtctgcttctgcccttaaggaattcagtttagggggcagtggggaccagggaacccatgattaatagtgtctgcccgctaagcgtgctcacatagtagcctgaggagagagggaattcctgagctgtggttttcagggccagcaggaattagtgggggacatcaaggcctggacacagggaaccacatgtacatgagcacctaaaatagtgcttgggagtcctccagcttggcaggtgcgagctctgggcctgccttgtgctcaggagttccaactttgtatgcggggtgcaggagtctggggagccttttaatcagtagagtggtgtgacccagacctgtgtttagaaagatattgctggtggagtggcaggaagagggagggggtcaggacctctggcagttaagtcagctaacagaggagaggtggggagggagaaggagccatcagaaaagagagactgaaaaggtagtacagaggggatgtcctgccatgatgggggaggagctacattctggaatgcatgggccagaagaccaagcataaccaaggatttaaattccttgttgactacctggtatagtgacctacagagttgcttgtgtctggttagtgttgaggatggtgggatttggagggaccacttagggaccacttagactgccgtcgatgcataggaaaggaggcctggcatttgattattaaaaactttatcgccgggcatggtggctcccacctgtaatcccagcagtttgggaggccgaggcgggcggatcacgaggtcaggagatcgagatcatcctggctaacacggtgaaaccccctctctactaaaaatacaaaaaattagccgggcgtggtggtgggcacctgtagtcccagctactcaggaggctgaggcaggagaatggcgtgaacccgggaggcggagcttgcagtgagttgagatagagccactgcactccagcctgggccacagatcgagactccgtctcaaaaacaaaacaaaaaacaactttatctccaggcagggcgtggtggctcacgcctgtaatcccagcactttgggattctgaggcaggtggattacctgaggtcaggagttcaggaccagcctggccgacatggtgaaaccccgtctctactaaaaaatacaaaaattagccaggcatggtggcgggcgcctttaatcgcagctactcgggaggctgagacaggagaatcgcttgaacccgggaggcggaggttgcagtgagctgaaagcctgggtgacaagagcaaaactcggtctcaaaaaaaataaaaaataaaacaaaacaactggccaggcgcggtggctcacgcccgtaatcccagcactttgggaggctgaggcgggtggatcacgaggtcaggagatcaagaccatcctggctaacacggtgaaaccctgtctctactaaaaatacaaaaaattagccaggtggggtggcgggcgcctgtagtcccagctactcattctcctggaggctgaggcaggagaatggcgtgaacccgggaggcggagcttgcagtgagctgagatagcgccactgcagtccggcctgggcgacagagcgagactccgtctcaaaacaaaaaaaaaacacaaaaaaaacacaaaactttatctcctacttgaacctggggtactgcatttcctcttgcgcacagcaggcatcttaacccgtgagagacaatgtgtgttcatccttgtggaggcagttgagagcatatttcatttcttttcttccttttttttttttgagacggagtcttgctctgtcacatcacctaggctggaataaagtggcgtgatcttggctcactgcaacctccgcctcccaggttcaagcaattctcctgcctcagcctcccgagtagctgggatcacaggcacttgccaccacgccaggctaattttttgcatttttagtagagatggggtttcaccatgttggccagcctaatcttgaactcttgatctcaggtgatccgcccgcgtcagcctcccaaagtgttgagattacaggcgtgagccactgcgcctggcctttttttttttttcttctgagacagagtctcactctgttatccaggctggagtgcagtggtgggatcttggctcactgcagcctcgaccagcctccctggctcaagcaatcctcccacctcagcatcctgagtagctaggaccacaggcgcacgccatcactcctggctaatatatgtatatattttttgagaccgagtcttgctctgttgccgaagctggagtgcagtggtatgatctcggctcactgcaacctccgcctcctgggttcaagtgattctcctgtcttgccctcccgagtagctgggactacaggcgcatgccaccacacccggctgattttttttatttttagtcgagatggggtttcaccatgttagccagggtggtctccatctcctgaccttgtggtctgcccgcctcggcctcccaaagtgctgggattacaggcgtgagccaccgcacccggctaattttttttgaggtggagtttcgctcctttgcccagtgtggagtgaagtggtgcgatcttggctcactgcaacctctgccccttgggttcaagtgattctcctgcctcagcctcccaagtggctgggattacaggcatgcaccaccacacctggctaatttttgtatttttagtagagatggggttttgccatgttgcccaggctgatctcgaactcctgacctcaggtgatccactctccttggcctcccaaaatgctaggattacaggcacgagccactgcgcaccgccctgatttttgtattttttgtagaggtggggtttctccatgtttcccaggctggtctcgaacttttgagctcaagcaatctgccttcctcagcctccgaaagtgctgggattacaagcctgagccaccatgcctggccttttttttaaaattaattaattaattagtttttttttttttttgagacggagtctcgctctgtcacccaggctgcatggagtgcagtggcatgatctcgcctcactgcaagctccgcctcccaggttcatgccattctcctgtctcagcctcccgagtagctgggactacaggcgcccgccaccgcgcccagctaatttttttgtatttttagtagagacggggtttcactgtgttaaccaggatggtctcgatctactgacctcttgatctgcctgcctcggcctcccgaagtgctgggattacagacgtgagccaccgtgcccggttttttttttttaagatggagtttcgcttttgttacccagattcgagtgcaatggtgcgatattggttcactgcaacctccacctcctgggttcaagtgattctcctgcctcagcctcccgagtagctgggattacaggcatgcgtcagcatgcctggctaattttgtatttttagtagagacaggttttctccatgttggtcaggctggtatcaaactcccgacctcaagtgatccgcctgcttcggccttccaaagtgctgggattacaggcgtgagccacctcacctggccagcttttttttttttttttttgagatggagtctcactctgttgcccaggctggagtgcatggcgcgatcttggctcctgcaacctccacctcctgggttcatgtgattctcctgcttcagcctcccaagtagctgggattacaggtatgagccaccgtgcccagccagcaatttctataaataggaatttagagtagcttacaaaattacaccagccagaagacttaatttagccttaaggaatagggttctctgttttccaatttcttaggtttgatagctaagcattttctttttcttttttttttttttgagacggagtctgctctgtcacccaggctggagtgtggagtgcagtggtgcgatcctggctcactgtaagctccgcctcctgggttcatgacattctcctgcctcggcctcccgagtagctgggactacaggtgcccgccaccacacctggctaatatatgtatatatatattttttgtatttttagtagagacggggtttcactgtgttaggatggtcttgatctcctgacctcatgatctgcccaccttggcctcccaaggtgctgggattacaggcatgagccactgcacccggccatagctaagcattttcttagttttactcagggtccagggtagaaagatggatgagatgcattagtagaagatcataaactgagggtgtcaaagttggtgaagctggtctgtgttctgtgttgaagtggttaaatctgaacgaactttagcagtatgttgacttaatttatatttatgttttaaaagcaggattctactggaacaatcagctgcatatttaaaaaattacttttatgaccaaatgtcttttatcttgcttgtcatgagatacatttaatggtgttgaggttttgggctgggcgcagtggctcacacctgtaatcccagtactttgggaggccgagccgtgtggatcacctgagctcaggagttcgagaccagcccgtccaacatggtgaaaccccttctttactaaaaaatacaaaaattagctgggcgtggtggcgcacacctgtaatccaagctgcttggtaggctgaggcaggaaaattgcctgaacctgggaggtggaggttgcagtgagccaagtttgaggttttgcagtgttgaggtttttcttctcagttatacctttttgagctaatcgttttaaaaaataccactgtctaaaatacactgaaattaattttactatttataatttttggttctggattgactgtacagaaaatgtttcattttcttactgtgacctttgacaaagaagggtgagtaatttgtggtgtgggcaggagactcagtggcattccccacttcctctggagttggtcagtgtggtataattctatttcagttgtgggcattcaccaatattgtttcctccttttcctgcagggccactgctctccaggaagataaggcttttaaagcagcctagcactagaaggtgaggtaaggtacttgaaaagagacatttctgcaaaagaaagttgaggaataatcacatactggccaaaatgataaccacagaattatatttatttatttttatttatttttttgagacaaagtcttgctctgtcacccaggctggagtgcaatggtgtgatcttggctcactgcaacctttgcctcccgggttcaagcaattctcctgcctcagcctcccaagtagctgggattacaggcatgtgcccccgcgcccagctaattttgtatttttagtagagacggggtttctccatgttggtcgggctggtctcgaactcccgacgtcaggtgatctgcccgcctcggcctcccaaagtgctgggattacaggggtgagccaccgctgcccagcttattcgtttttgagacaggatctctgtctgtcacccatgctggagtgcagtggcatgattacagctcactgcagaccttgacctcctaggctcaagccatcctcccaccttggcctcccatgtagctgggactacaggggcatgtcaccatgcccggctaatttttgtaactttttgtggagatgggaactcactatgttgtctgggctgatctcaaacccctgggctcaaacgatcctcccgcctcagcctctcaaagtgctgtgattaatagacatgagcctccgcacctgacttagaattttaaaacattaatagtggaggaaaagctctattggataatacatacatttaagtagtgtggaagataaaagtggaaagaggctgggtgcggtggctcacacctataatcccagcactttgggaggccgatgtgcacagatcaactgaggtcaggagtctgagaccagcctggccaacatggcgaaaccctgtctctgataaaaatacaaaaattagctgggcgtggtggcaggtgcctgtaatcccagctacttgggaggctgagaaaagagaatcacttgaacatgggaggtggaggttgcagtgagctgagatcctgccatcacactccagcctgggcaacaagagtgaaactgcatctcaaaaaaaaagtggaaagaaaaggactgggcgtggtggctcacacctgtaatcccagcactttgggaggccgaggcgggtacatcattttaggtcaggagtccaagaccagcctggtcgacatggtaaaaccctgtctctagtaaaaatacaaaaattagccaggcgtggtggtgtgcgcctgtaatcccagctacctgggaggctgaggcaggagaattgtttgaatcttgaatctgggaggcagaggttgcagtgagccgagatcgtgctgttgcactccatcctgggcgatggagtgagactctgtctcaaaaaaaaaaaaaaaagaaaaaaaagtggaaagaaaagagaaaaggagcccgatctcatgcctgtaatcccagcattttgggaggctaaggtgggaggattacttgaagccaggagtttgagaccagcttgggcaacaaagagagaccctgtctctacaaaaaataaaaaaaaaaaaaaaaattagttgagtgtggtggcacgttccctaggtactcgggaagctgaggtgggggcatcttttgagcccaagagttttttttttttttttttttttttaaattttttgtagagagggttttgccatgttgcccacgctggccttgaactgctgagcttaagcgattcatctgcctgagcctcacaaactgctggattacagatgtgagccactgggccttagcctaggagttgaggctgcagtgagctttcatcacagcaaatcacaccactgcactccagactgggtgacaaagtgagaccctggctcaaaaaataaaaaaatgaaaagtctcttgtcgtcccctcccttttttttttttttttttttttttttttggatacagaatcttgcactgttgcctgggctggagtgcaatggcgtaatctcggctcattgcaacctctgcctcccgggttcaagcgattctcctgcctcagcctcttgagtagctgggattacaggtgcccaccatcacgccgagctaagtttttgtattttcagtagagacgaggttttactatgttagccaggctggtctcctgaccttgtgatcctcccacctcagcctcccaaagtgctgggattacaggcgtgaggcatcccattttattttttctgtaaatagggaatacaacacatggtactaacttgattaaaagttcaaaagggttatacaaaggagggaaagaaaccttccttccatctatcccctcagcctgttgttcacctttccagagacagttgtgatcccccctgattcctggggtctcctccagagatggcccttggcagtgttcttaccaagtttgagtatagatttttttttttttttgagacagagtctctctctgttgcccaggctggagtgcagtggctcgatctctgctcactgcaacctccacctcctggattcaagtgattctcctatctcagcctcctgagtagctgagacgacaagtgcgtgccaccacacccagctaatttttatatattcagtagagactgggtttcaccatgttggccaagctggtctcgaactgaactcaggtgatcccgtccgtcttgatctcccaaagtgctgggattacaggcgtgggattcaggcccctgcgccggcctgaatataacatttctttttttttttttttttttttttttttgagaccgagtctccctctgtcacctgggctggagtgcagtggctcgatctctgctcactgcaacctccgcctcctgggttcaattgattctcctgcctcagcatcctgagtagctggcattacaggcgcgcaccaccacacccggctaatttttttttgtatttttagtagagacggggtttcagtgtgttggtcaggctggtctcgaactcctgacctcgtgatccacctgcctcggccccccagagtgctgggattacaggcgtgagcccccgcgccagcctgaatataacattctttttttttttttttgagactgagtctcgctctgtcacccaggctggagtgcagtggctcgatctctgctcactgcaacctctgcctcccgggttcaatcgattctcccgcctcagcatcctgagtagctgggattacaggtgcgcaccaccacacccggctattttttttttttttttttagtagaggctgggtttcagtatgttggtcaggctggtctcgaactcctgacctcgtaatccacctgccttggccccccaaagtgctgggattacaggcgtgagccactgtgcctggtcatgaatataacatttcttttttttttttttttttttgggagacggacggagtctcgctctatcgcccaggctggagtgcagtggcgcgatctcggctcactgcaagttccgtctcctgggttcacaccattctcctgcctcagcctcccgagtagctgggactacaggtgcctgccaccacgcccggctaattttttgtatttttttagtagagacggggtttcactgtgttagccaggagacctgttagccagaaaggtctcgatctcctgacctcgtgatccgcccgccttggcctcccaaagagctgggattacaggcgtgagccactgcgtccggcgcatataacatttctaatggttaatctgtccctaattcttagacagtttggttctttttttttgtttttcttcttattatttgttttagctatttcctacaggaaggaggttatttcttactttggttgtaatagataatgttgcaattaacatctctgcataaagttttttttttttttttttttttgagacggagtctcgctctgtcacccaggctggagtgcagtggcacgatctcggctcactgcaagctccgcctcccgggttcacgccattcttctgcctcagcctcccgagtagctgggactacagttgcctgtagccacacctggataattttttgtatttttagtagagagggggtttcaccctgttagccaggacggtctcgatctcctgacctcgtgatccgcccgcttcggcctcccaaagtgctgggattacaggcgtgagccaccacgcccggcctgcataaagttttttaaaagttttttgtatcataagaagtgaattgtggccgggcgcagtggcttacgcctgtaatcccagcactttgggaggctgaggcgggcggatcacaaggtcaggagatggagaccgtcctggctaacatggtgaaaccccgtctctactaaaaatacaaaaaaaaaaaaaattagccgggcgtagtgttaggcgcctgtagtcccagctactctggaggccgaggcaggagaatggcgtgaacctggaaggcagagcttgcagtgagctgagatagtgccattgcactccagcctgggcgacagagtgagactctgcctcaaaaaaaaaaaaaaaaaaaagtgaattgtgatttacagttttgtagaagcacatttatcaatgtcaagtaaggcagatttgtactgatttttatttttaagtattgtgcacgttttctgtagtcccttttctgtgacttgcatggatttgtgatttttatagccatgtggagacctagtctcagtgttccctgcccttggggacatgaggagccacagattcattcttgctgaggcagtcatggcccttggataccctaagtataggggagtgtgccagttgtggggagctcaaggatgaatgaagcacttggaaggatatgtcgtattcagggaaacagtagccagtgcccagcttgattccctgttttggcatttactcttcatttctatagatgttgtttttgtatatgaggtatgagaatctacaaacaagcacctcttatagagttctttctcctaatcggtacacagttttctgtatctataggttccacatctgtggattcctccaactatggattgaaaatatttgggaaaaaaggatggttgcgtccgtatgaaacatgaataaacttttatcatcgtcatcatttcctaaatgttagaacaactattttcataccatttacattgtattatgtgttataagtaatccagggatgtttaaagtatacaggaagatgtttaagggatccagggctgtgcaggacgtgccttgttaacaaaatgtttacaagcagtatacttggtaaaagtcatcgctattctctagtctcaataaactggggacacagtgcattgcggaaaaccacagggacctctgctcttgaaagcggggtattgtccaaggtttctccccatgtgatagtctgaaatatagcctcgtggaatgagaaagacctgaccttcccccagcccgacacctgtaaagggtctatgctgaggtggattagtaaaagaggaaagccgcttgcagttgagatagaggaaggccactgtctcctgcctgcccttgggaactgaatgtctccgtgtaaaacctgattgtacatttgttcaattctgagataggagaaaaactgccctatggggggaggcgagacatgtttgcagcaatgctgccttgttattctttactccactgagatgtttgggtggagagaaacataaatctggcttatgtgtacgtccatccagtcacagtaccttcccttaaacttaattatgacgtagattctattgcttacatgtttttgtccttattatgatgcaaatattacaccattttatataagggacttgagcacttgtggattttgatatcctggaaccaatccctcatggataccgagggaagagtttgtaaatgtattaaaacaaagtagtggaattggaatcaaattcttttgattttgtaggtatctgtgtttagccttttcactgtgctgtgaagatttcccccccaggcatcctaggggttgatgggagatttacttaagattcccaaggctgtctagggcagaagtgaaccagttctgccttggttgtcataaacacctctgttaattagctcagttgttctccagggatagattgattctctagctagcttttgccaagaaaaatgatccagtcaataatggaattccaaataagatttcctttttatttggctattaatcagaacctgggataacatccattttctgggccctgattttactatggaatatttccataaaacatgcatgtgattactgtaaatgtcctgtaaacactcctgcttgggctggtaggtcatctttttttttttttttttcttttgagacagttttagtcttgttgcccaggctggagtgcagtggcgtgatctcagctcactgcaacctctgcctcccagattcaagtgattctcctgccacagcctcccaagtagctggaatgatacaccatgcgccaccacacctggctaatttttgtatttttagtagagatggggattcttcatgttggtcaggctggtctcaaactgcgacctcagatgatctgcctgcctcggccttctaaagtgctgggattacaggcgtgagccaccatgcctggactgtaggtcacctctgtgtccaatctgccagaggtcagggatacgttgccgtctaggattttttatattggagaccagtctgatgagtagcccttgagcagggactggattctaagtcttggagaaaatgagtaagttctacctcttatgtgaggtatgattgaagaaattgtgttttctttgttttttgagaggcagggtcttgccctgttgcctacctggagtgtggtggcataatcatagctcacttcagtcttgacctcctagggtcaagcaatcctcccacctcagcctcctgagtagctgggactactagcacgtgccactatgcccagctaatttttaaatttttttgtagcgatgtggtcttggctatgttgcccaggctggatcctcctgcctcagcctcccaaagtgttgggattacaggcgtgagccaccacacccggcccagaagtgtcttatatttttagacttttgagcagtgttggaacgattgaattgcctgagtggagaaatttggtaggaagagagtagaagagaggctctttattaaagacctaaaaatagaattcattaaagtcacaaatagataacagtaggattcctgtctgactctcttctgctttgggtttgtgctaccagctgttgcgtttgcttacctagaaaatagaataatattttgtcagaagggtcaacagtatggtcctaaaacattgtgtttgcaagtctgaggatgtgctttttccaattttaaaagtagttagaaagtgaccagattctttcatgtaggggagaaatcttagcaggagacgttggttcttctgcttgtagtgccagccctaacctgacaggtcctgtggggacccctgtctcttcagagccctgagcctttttcccttctagttggactttgctgactagagagggatatcctatgtaggccacctgattacctgatttaatcagatggtacctctgttattttggagaagagagtctccttttgattctaatagctgaagataaaaatggctccgtatgctttcttcctgtggagggctctgctgccctgagctgcctgtgccctttacatctgtgtgagggggtggaggaatgtcctggcctcctcacttccatcctgctatgggcttccaggaagaatggggtccattgtgggctgtacccaaaggcacagtcctctgcctcagtgtcaggcttactgtggtctctgtgcccagtttgctgtggtcactgggtgccaaggggttgggagctcaggaagccattgctgcttttttttttttttttgagacggagtcttgctcttgtcacccagcctggagtgcaatggcacgatctctgctcactgcaacctccgcctcccaggttcaagcaattctcctgcctcagcctcccgagtagctgggattacagatgcgcgccaccacattgggctaatttttgtatttttattgttattattttattttattttatttgagacggagtctcgctctgtcgcccaggctggagtgcagtagcttaatctcggctcactgcaagctccgcctcccgggttcatgccattctcctgcctcagcctccggagtagctgggactacaggcatctgccaccacgcctggctaatttttttgtatttttagtagagatggggtttcaccgtggtcttgatctcctgacctcgtgatctgcccgcctcaggctcccaaagtgctgggattacaggcgtgagccaccgcacccggccaaggacggagtgttgttctgtcgcccaggctggagtgcagtggtgcgatcttggctcactgcaaccttttggagacaaaaggcctttgttgtgtctggcctttatctttgttgtaatgaccctgaaaccgtggcctgagtctttgaggtggaagttgccctagaaatgtcatgtaatataccagaatttatcaagcctttctctagtactgggacacttaacatgtgcctgtggtacttttgtttgttttgctattatttcacatttaatttcatttttgtaaataaataattttgaagccaaattcagatttttcatctttatgtctacttaggttgcttagacctaatgtggtagatcaggttttgtttttgttttctttcttttttttttttttttttttttgagacaaggtctcactctgtcacccaagctagagtgcagtggcatgatcatggctcactgcagtctgaattcctgggcttaagcaatcctcctgcctcagccttctgcaaagctggaactacaggcatgtgccaccatgccagcctatttttttttccttttgtagatacatggtcttgttatgttgcccaggctagtctcaaactcctagcctcaggtgatcctctcatctcaaccttccaaagtggtgggattacaggtgtgaaccaccatgcccagcctgttttcttgttttgaatccaagctttctgagggttgtcctttaggaggagaatgtaaggaattccagagtcagggaggcatgggctgtgctctgggagaggcctggggaggcactgctctggaactgcctgtaggagtggtgtcagactgccagcagaagccagggtggtgaggggagggctgaatgttctgcaagagagatttataccactattttctttttcttttatttatttatttatttatttatttatttatttatttatttattttttgagacggagtcttgctctgtcgcccagactggagtgcagtggtactatctcggctcactgcaagctccgcctcccaggttcacgccattctcctgcctcagcctccctggtagctgggactataggcgcatgccaccacgcccggctaattttttgtatttttagtagagacagggtttcaccgtgttagccaggatggtctcgatctcctgaccttgtgatcctcctgcctcagtatcctgaagtgctgggattacaggcgtgagccaccgcgcccggccctttttcttttttttgagacagagtctcactctggagtgtagtggcatgatctcggctcactgcaagctccacctcgtgggttcaagtgattctcctaactcagcctcccaagtagctgggattacaggtgtgcatcaccacgcctggctaatttttatatttttagtagagacagggtttcaccctgttggccaggctggtctcgaactcctgacctcgggtgatctgcccacctcagcctcccaaagtgttgggattacaggcgtgagacactgcgctcagcctgatatgaatattcttgacggtgtcttctgggtatatacctaagagtgaactgttagatatatagtatttgattttttttgtttgttttgttttgctttgtttttgagattcagtctcgctctgttgcccaggctggagtgcagtggtgtgatcttggctcactggatcctctgcctcccaggttgaagtgattttcctgtctcagcctaaccagtagctgggattacaggcgtgtgccatgcctggctaatttttgtatttttagtagtaatggggtttctctgtgttgcccagactgatctcgaactcctggattgctcaagcaatccacctgccttggcctcccaaagtgctgggattacaggtatgagccaccgtgcccggcctgatgttttaattattgagaattttgtattttttgtagagatggggttcttcctctttgcctaggcacacgactgtctatcccagatggctgcactggcctaggacagacggttcttcccccagtacgtcaagaccctggagggtgcaagctacagaacagctgggctcctgcattcctcccagaccctgtcttcagtaggacaacaggcaacaaacttaaatttggtaatatgaatttagaaaatgttaatgttttccagaacagtgaaactacaatataaaggttagacttgagaaccaaagttactctctagcttccctcttctgcccttcatgtgctcagcacttgtatctgtgttctcactacccctgagccctgagttcttctggggttggcccaggaggtgccttggttcagagagatacctgggaggaaaccacatggaatcaacaacagtactacatatttgttattatttggagtaattagccccatacattctttttttttttttttttttttgtttgagatgggatcgtgctctgtcacccaggctggagtgcagtggcgtgatctcggctcactgcaacctccgcctcccgggttcaagcgattctcctgcctcggcctccccattagctgggactacaacaggctcccgccaccatacacggctaattttttgtgtttttcatagagacggggtttcaccatgttagccaggatggtctcgatctcctgacctcgtgatctgcccgcctcggcttcccaaagtgctgggaattcagacgtgagccaccacgcccggccagccccataaattcttgatagcaattttcctgaggtactcaagttttactagaaaaacatagcatcatgttttgattcattagttgtctagatgctcaccctcctgtattatcattctggctaactattaagtaccattactcccagattgaatttatgacacctgctgcccaccatgcccattaatcaaacaataagggcagggcaaactgctgtctcatgttgtttcaaactgccccacctccttcctcttccatcttatgttattaatgaaagagtttgacaatacttaaatgttagtgaaaataagagaaaagtcgtttgtatctttaggtgagggtgtaaattgaaggacattttgccaaatctaacaattccaatgtacatatcctttgacccagcaattccacatctaggattatatccttagatatgttctaagaagaatgcaaggatgagtgtgagaacaccctggagagcaagatatgcaagatacttagacatttagatgtgccacacacaataggggtgaatgagaagaaggatctacccactggggctgaggtctctcagttctgctaaattagaaaaaggaacggttatttatttatttttttttgatagggattctcattctgtctcccatgctggagtgcagtggcgcggtcttggctcactgaaacctttgcttcccagggtcaagcgattcccctgcctcagcttcctgagtagctgggattacaggtgcgtgccactatgaccatctaattttttatatttttaatagagacggggtttcaccatgttggccaggctggccttgaactcctgaccttatgatctgcttgccaggtgtgagccactgcgcccggcaaaaaaggaacagttttgaagaatttgatttcatttgaactttaagaatgaaattaaaagagatgtgcttgtttatgtgtttagagatatacattcaatgtgtcatttgtggagagctactgaagaaactcagtctgctcacctgaggacctgggaaggagacctgcttttcatttgtgtcctagtgtggtgttggaatttattttacctccatgtgaattaccttttttttttttttgagacacagttttgctcttgttgcccaggctggagtgcaatggcgtgatcttggctcaccgcaacctctgcctcccggattcaagcgattctgcctcagcctcccgaatagctgggattacaggcatgtgccaccacgcctggctaattttgtattttcagtagaaaaggggtttctccatgttggtcgggctggtctcgaactcccgacctcaggtgatctgcccacctctgcctccagtagtgctgggattacaggtgtgagccaccgtgcctggcccttgaattacttttattgcattaagtcaaaggggaggaccagatagttgatgacatcattgtgagatagactgggaaccaatagtagggaatcggatactgggaaacactggatgcagcgtgcccacattttgcccttagctctgggacctcttaacttggtaatgatctgatttgggttttttttcctctaggagggaaggttcctgggaagggaagatagaatctatttttaatcttaagaaaacatagctcaatgtagtaattttgggccctagtgtgacattttcttccattataacccaagtcacttttaaaacaaaatcctttttttgtatattttgtgtttgtaatgtttctagaggaaaatgcttttaaagtatcctcacttcccttcgtaaacttgggagggcttgggacctggtggggtatgtgttttgaatcatgctgtctgggggattagtgcctggaatccagattcctactggacaaagcgctggggtttgaggtaagtggggtggggtagggggagggttatatagctgtcacagattacagagcttacctgctgactgcttcacaattgttggtacatacacctgctttggcatggacgtcctgagagggggcttggaccatgacccgtgttcctttctcttaccacttgtttttttccattttggctgggcgcggtggcttacgcctgtaatcccagcactttgggaggccgaggcagacggatcacgaggtcaggagatcgagactatcctggctaacacggtgaaaccccgtctctactaaaaatagaaaaaattactgaggtgtggtggcaggtacctgtagtcccagctacttgggcggctgaggcaggagaatgatgtggacccgggaggtggagcttgcagtgagccgagatcgcgccactgccctctagcctgggcgacagagtgagactctgtctcaaaaaaaaaaaagttttttttttttatataactttaaatttacagaaaaattgcaagaataattcaagaaactcccaaatactccatctagagtcaccatttgtttgcattttgctgtgtttgctctgtcattctcttttctatctatacctttttttctgaaccatctatgagtaattgacagaaatcatgcctctttattcctaatttttttattcttttattttttttttttgggacagggtcttgctctgtcacctaggttggagtgcagtgatgagatcttggcttattgccacctccgcctcccaagcttgagcgatcttcctgccttagcctcccgagtagctgagactgcaggtgcaggctaccatgctggcctaattttgtatttttttgtagagatggggtttcaccatgttgcccaggctggtctcaaactcatcagtgcaagctatctgcccttctcagcctcccaaagtgctgggattacagacatgagccacaacctggcctactcctaaattctttttttttttttttttttttttgagacggagtctcactctgttgtcttggttggagtgcagtggcacgatcttggctcactgcaacttctgcctcccaggttcaagcgattttcctgccacaatctccctgagtagctgggactacaggcgcgcactactacgcctggctaatttttgtactttagtagagacaggtttcgccatgttggccaggctggtctcgaactcctgacccaggtggtccgcctgcctcagccttccaaagtacaggcgtgagccaccacgcctggcatttttttctatttttaatagagatggggtcccactatgttgccggggctggtctcaaactcctgggtttaagtgatcctcctgcctcagcctcccgaaatgctgggattacaggtatgagccaccgctcccagccaagttgttttttttttttttgagacagagtctcattctttcgcccaggttggaatgcagtggcgtgtttttggctcactgcagcctctgcctcctgggtcaagcagttctcctgcctcagcctcccaagtagcagggatcataggcacctgccactatgtcctgctattttttttttcttttttttgagacggagtcttgctatgttgcccaggctggagtgcagtggcgcgatcttgctcactgcaagctctgcctcccgggttcacgccattctcctgcctcagcctcccaagtagctgggactgcaggcgtccgccaacacgcctggctaattttttgtatttttagtagagatgtggtttcactgtgttagtcaggatggtctcgatctcctgacctcgtgatccgcccgcgtcggcctcccaaagtgctaggattacaggcgtgagccaccgcgcccggcctgtcctgctatttttgtatttttagtagagacggggtttcgccacattggccagtctggtctcaaactcctgacctcaagtgatcctcccgccttggcctcccagagtactgggattacaggcgtgagctgcctcgcctggccccaagtctattcttttttttttttttgagacggagtctcactttgttgcccaggctggagtgcagtggtgagatctcggctccctgcgacctctgcctcccgggttcaagcaattcttctgcctcagcctcctgaataactgggattataggcatgggccaccaagcccagctaatttttgtatttttagtagagacagggtttcaccatgttggtcaggctgttctcgaactcctggccttgtgatctgcctgccttggcctcctaaagtgctgggattacaggcgtgagccaccgtaccccgcctggctccaagtctattcttaagaccacagaacttttgatttaagattcactggacagatacataacaatacataaaataaatgttttatttacaaaataagacctttaagtagttagctgccagttgaaataatgatttggactggatgtggtggtttatgcctgtaatcccagcattttaggaggctgaggtgggagaattgcttgagcctaggaatttgagaccagcctgggcaacgtggtaaggccccatctctacaaaagataaaaaattagccaagtgtggtggtgccatgtttgtaatcccagctatttgggaggctgaggtaggaggatcaattgagcctgggagggtgaggctgcagtgagccatcatcgtgtcattgcactccagcccaggtaacagagtgagaccctgcatctttaaaggaaaatttaaaaagagataaatgcaggagatcttccatcttatcaaaagggtgctgttataatttatatatttttaagtactggatggggaggtggagtagcagctccaaggtacttttcagtggtggccttaatctgctgatgcatggaaggtgtgttcttcttccagatagccctgggatctcctgaatttccaggttgggctactcaggcatggattgactcctacagttcaggcggatggagatcccaccaacccacagcttaattcttcagatgctttatcttcatttctcatgtatcttcagttggcttctaatgtgagcacataaatgccctgcagaatttctttcccatctttgtgcaaatcattatttttattctttttttttttttttttttttttgagacgacagggtcttgctcagtcacccaggcgggagtgcagtggcatgatcatggctcactgcaacctcaacctcccaggctcaagcgatcctcccacctcagtagctgagtagctcagattataggcatgcgtcaccacactcagccaattttttcatattttgtagagacagagtctccctgtgttgcccaggctgatttcaaactcctgggctcaagcaatccatcaaccttagcctaccaaagtgctaggattacaggcatgaaccactgtgccttgcctgcttttcatttttaatccttgggttctaaaatgcaagaattaatttccaaataattagtatggaatggaatcccactttttcctgtgtgctgagagaatgatcaaagatcacagaaaagagatggagacagaagaagctgagagcaagggcatctttaaggatttcttcagtcttgttaatctgggtgtaaattctgtgtggctgacagcctctgaggatcccttgaagttttgaggaggaggaaagcgcttgagagtaatggatttacttgattttactttgtatagaagagcctgaactggacatatctccaggtatgtgctgtggtctttaacaagcagcccaacatcctttgctggggaaggccagcaatgtgggagctagtggggcctagcccaggagccttgcgttcaccaggtcactgggaactggtgctttctgatgcacctctatgcaagcctgattctgaagtcagatgtggtgggcatccctgtccatagtgttggcctggcccaccatttcactggtcatagaatggctgtagctttgcagagcagggattgcgagaatggaagaatgtcttttggctcttctgctctagcttttggaagtacgtcagagaagtttgtgattttttagaatttgtagctgtggcaaggctgaagcaggtaaaagggccaattagaaccatctgtgggagggaaggaattctgttagcaggaaggaaaacctgagcaaagggagtgggtggtagttttgtcttgttcttttataaacacagtgtgttgatatggcagttcctggcatgggtgaaatatttttgatggttgagcattaagaatgtagccaaaaacaagaatgtggctaaaagcaagtcaccactttaaacactgaagattgaagcatttgcctagataaatattctgcagtgaatatgccagaattcccacatacctgtttggctcctgaggcattgtgcttagggtcccaggcctttattacaggggctgctggcagggtcaagggctgggttgcctggagcttccctgacatttcgcctcactcctctgttttggagtctaattggccaattaggtcagaaaggccaccagccagcacactttttctaaatttaattcatcattgctagattagcatattaattttgagctatggcacttatttttaatctttcgtagtgtaatggaaaaaataccagaaagctcagcattgaacttcaaagtgtgaaatcaagtgatcattgcctttatgcttggtgaattattattattatttttttttttttggagacagagtcttgcactgtcatccaggctggagtgcagtggcgtgatcttggctcactgcaacctccgcctcacaggttcaaacgattctcctgcctcagcttcccgagtagctgggactacaggtgcctgccaccacgcccagctaatttttgtatttttagtagagacggggtttcaccatgttagccaggatggtctcgatctcttgaccttgtgatccacccgcctcagcctcccaaagtgctgggattacaggtgtgagccaccggcgcttggctgcttggggaattatttaggggatttagtggaatttcctttcctgtactctgtgggcatctgctgagtacctgcttggtgccaggcatctactgggagagaaagcagcagagtcaatgctgtcaagacccctgcagtggacctcttctcccccttttctctcaagggaaccattggcatccagccttgacccccagtagacactgatcatccagcccccacagggtagccccactgtacctttgtactgagttggtgaggggatgggatagccagggggagtttggggaagtcagaaggcaactttcagtttctattagagtaagcacttggaaaatgtctgtttataatgtattagtataaatacttggtttgttaccacttgtgtttcctgatttagtaatgtatataaatcttaattgaatatttttgtgtgaaacttggaaagactgcatctatagcaaataaagcctcacacctagcacagggtaggtagttggtaaacatgtgctgaagtgttaattgttgggctgtcttcagagaattgtagtttgctttaattgcattttttgatgcaacgcgggtgcaagggtgtggtaattcattcccacttggattctgctgaggctggccacccacctctcagacttattcccccaccacctctccacctcctactctagctgctgcagccaaatggacagttagggccgggcacagtggctcatgcctgtaatcccagcactttgggaggctgaggcgagcggatcacaatgtcaggagttcgagaccagcctggccaatacggtgaaaccctgtctgtactacaaatacaaaaattagctgggcgtggtggcaggcacctgtaaccccagctactcaggaggctgaggcaggagaattgcttgaacccggaaggcagagtttgcagtgagccgagatcgtgccacttgcactccagcctgggcgacagagcgagactccgtctcaaaaaaacaaaaacaaaaacaaaaaaacagaaaaaaaaaaaccccaaatggatggtttggcctggtccttatctttggcctcagtttatccttttctgtcttcagtgtcttacctgggcactggtgattaaagtactggaccatgtcatcacggggatatgcccctaaaagcctcctaaagtattttcttctgaagtctaattggtgtaactaagtaatgttttctaaaatattgtggcaaaatatacataacataaagatggtgtatttatttatttattttgctttgtcacccaggctggagcacagtggtggagtcatggctcatggcagcctcaacctcccaggctcaagcagtcctcccacctcaggccaagtagctgggactacaggtccatgcctacgtacttggccaattttttaaatttttaacttttttttttttttttttttttgagatggagtctcactctgtcgcccagactggagtgcagtggcgcgatctcggctcaccacaacctccacctcccaggttcaagcaattctgctgccttagcctcctgagtagctgggattacaggcgtgtgccactgcgcctggctaatttttttttgtatttttagtagagacagggtttcaccatattggccaggctggtcttgaactcctgaccttgtgatccgcctgccttggcctcccagagtgctgggattacaggcatgagccactgtgcccggcctaaatttttttttctttttttttttggcacaatctcggctcactgcaacctctacctcccaagttcaagcagttctcctgtgtcagcctcctgagtagctgggactacaggcatgcaccacaacacccagctaatttttgtatttttagtagagatggggtttcaccatgttggccaggatggtctccatctcttgatctcgtgatccacccacctcggcctcccaaagtgttgggattataggtgtgagccactatgcctggcctaaatttttttttgtagagatgggggtctcactatgttgtccaggcttatattttaatataccatcttaaccattaaaaatgttttttttaggggctggctgtagtggcttgtccctatagtcccagtgctagaggaggctgaggcaggaggattgtttgaaccaggagtttgagaccagcctgggcaacatagtgagaccctgtctctacaaaataaaaactaaaaaatggccgagcatgatggttcacacctataatcccagcactttgggaggccgaggtgggtagatcacctgagatcaggagttcaagaccagcctggctaacatggtgaaatcccatccctactaaaaatacaaaaattagctggacgtcatagtgggcacctataatcccagctactggagaggttgaggcgagagaagctcttgaacccaggaggcggaggttgcagtgagccgagattgtgctgatgcactccagcctgggtgacagagcaagactccgtctcaaaaaaaaaaaaaaaaaaaattaaaaaatgagccaggcatggtgctgtgaaccagtagtcccagttgtgggaggctgaggcagaaggatcacttgagcccaggagtttgaggttacagtgagctattactgtaccactgtactccaccctgggggatagattgagagactgtctctcaaaaaaaaaataaaaataaccccaaacccacctttttaaattgtgaaaaacacaatataaaacttaaccatcttcaaagtcaagtatactgttcggtaataaataatgtttaacgcagtgtatggacttcagtggaatgtagaaggaattctttcagtgagccccattacgtaccatgttaaaatctactcagattaaaagccatggttcagtggagaatgactgttctgggttttgaaccttgcttttcttccctttccctagaacatgtctgcacctgggtggatttatacctaggttttaaacctttgcttctgtctttgttggaaaaaaccaaaccaccgccagcagaagccactgccctttgtttatctgtgataagtgagaatttgtaagaattttccaagtgagagaagtgttcaaagtagcttttatgtttgatagaatgtgtagtgcttgcctctcaggggtggtattttttctcccacgtatttttacctttaaatctcttgctgtatatgtgaccctggctccctttggttggtcctccagctccctgatggtcctggggctccctccatatcactggtggtatttccacattgcctgcagtttaggtaggaacctgtcccatgtcagggaaaccctatctgtcccctgaactgagcacttttaattttagggtgataccttgaatcttcaccagtcacttgacttcagacctttctcatctgacgccaaggagtcaaaaaggcctgtttttaactagaagcagagacatttgccatttttttttttaatatttggagctcaaataaacaatgacttcacaccactgttttccactgtgttgagtacatcctgttggccatgatattgagcagttttaaactggttaacctttcagaaactttatattaatgttggactgacagttaatatttaacttgtcaaagtgatttttgctagattgaacctgaagtggttaatatttctgctttttatgttttccaaaaccatttaaaataggaacatggtattttattattttaatctggtttcaaaatgaatatcccattttctttattattattattattaattaattttttttttttgagataggttcttgctgtgtcacccaggctggagtgcagtgttgtaatctcactgcaatctcaccatcctgggttcaagcagttcattcacctcagcctcccaagtagctgtgattacaggcatgcgccaccatgcctggctgaactttgtacttttttgtagaaacagggttttgccacgttgcccaggctggtcttgaagtcctcagctcaagcaatctgcccacctcggcctcccagagtactgggattctaggtgtgtgccactgcacctggccattccttaaatgttttaatgactgtggcaaatgatagcaatttaacagcttaactactatttttaggtagcgtagctatttgggagtaggggctcctaggagtggtgggatgggctacctctgccaaattttgtgtggttaataatgggttgagtctcccaacttttcttttattcttgggaagcaaaaactaatagagagctgttgtttcagagtttttaggttaagatgtgtgaaagtttcagagccgggtacagtggcctgtgcctgtagtctcctatttgggaggccgaggcaggaggatcactggggagttcaaggctggtgagctataattgtttctgtgaatagccactgcacactagcctgggcaacatagtgagaccctgtcttaaaactaaaaacagaggtacttaaaaatatatatatctgaaagtttcattcactgtgagtttttctatggatgaggaaacattaagtttatggcaaattgagttggtgccccatgtgcatttgttcttcacatctgttgagtggaaagcatttattaactgagttccctgtgtgcgtgggcactcatagctctggggaggcagcctgagtggaacagagccgcctgttccataaggctgtctggacagaatggggtcataagggcctggctcctcatgggcatctcccctttcctcccaccaagcaacatcctttggttgcatcttcctgggggatggtattggtggtggtgatgggaggggccagtgggatccttacctgctgaaccttacccttggatgcctggtgtccttgccagttactgtataatgtttttgatttcctagttatatccctgatgactgatctgataaactttaaatatacctgcctctagggtagctttaatatattttggctacaaaggtcactaccttttaggtattattgataacttgacattttacttcttcttctttttttttttttttgagacagaatcttgctctgtcgcccagtctggagtgcactggtgtgatcttggctcactgtagcctccgcttcccgggttcaagcaattttcctgtctcagcctccgcttcccgggttcaagcaattttcctgtctcagcctcccgagtagctgggattataggtgtccgccaccatgcccgactaatttttgtatttttagtagagatggggtttcaccatgttggccgggctggtcttgaactcctgacctcgtgatctgcccgcctcagcctccaaagtgctggtattacaggcgtgagccactgcacctacctggcctgacattttacttctgcccatcacttgagagtcccacatatcacaactgggaggaagggagtgcctggtcattggcagatgcgagccacttactggccctaccccaactagctctggttcttctggctgagggtgtttatctgcagtgagtctcagggtctggggtctggggcagtgctgagagcttagactcagttgtgggtactgcactgggtgctggcacagaggaataaggttcccattcccactactcgaaaaagagcttctgtagctcctgtcagccagtggtgaatccagctaagacatgttcttgggctgccttgagcacttcctactctcttttagaggatataatgtgaatgagtgtgaggtgttaaattgggtagctgtgtcaggaagactaggtggctgtggccagaatcttgccagaatctttctgtggttcccaagcactcttttctcccacaagttctggccaccaagctgtatgtgaccacgactgagtatttacctctgtttggaccttggtctctgaaccacgaggaggaggatctctgtagcgtctctatctgaatgactgagtgtatgagtatgagactgtgtaaaaaaaacttccagagggacattctgatacaagtatatggatgcagcctatcagattcctagcacaggcagacatgacccttgcttataggaagccagcatcagaaagacaaaagggtgttttattaccaagttgcaaaaaatttttctccttagagcatggaaaaccaacacatagtagttggagttgtgccctgaacatcgcctgcctgctaaatgcagagcacttagtcatgcccatgaaacagacaccccatgtcgtcatgtgtccgcagatagcagacagcttaagttcctggtagggcagggtgtgtctcataactgactgtttttaaataagctgagaattttaaaattgagaatgagattggaatagtgaaagatcagctggatctaataagtgaagtaaagactaaagatgatgggaagaacctgaaaaaaaggtcctgtgtctccccattcattcattaggtgtatggtgtatgtctggcactggatgagtgctgggcacatattagtgattgcaacagatgtatccctgctctcccacaacttatagtcttgtgggggtgttggttgagctgagccatttactaaattagaattaaaatgcgtctgggcatggtggctcatacctgtaatcccagcactttgggaggccgaggtgggcagatcacccgaggtcaggagttcaagaccagcctggccaacatggcgaaactctgtctccactaaaaaatacaaaaattagccaagcgtggtggcaggtgcttgtagtcccagctacttgggaggctgaggcagggagaattgcttgaacccgggaggcagaggttgcagtgagccgagatcatgccactgtactccagcccgggtgacagagtgagactccctctccaaaaaaaaaaaaaaggattaaaatgcataagaaaggaaaaggccagtaaagaaaacactatgcaacagtaaagaaaactgtaggccaagcacagtggctcacgcctgttcccaacactttgggaggccaaggcaggaggattgcttgagcccatgagtttgaaaccagcctgggtaatatagtctgtatctcttcaacaaaatttacaaattagcctggtgtggtggcgcacacctgtagttccagctacttgagaggctgataggaggttttcttgagcccagaggttgaggctgcagtgagctgtgattacaccatttccagcctgggtgaccaaaaaaccaaaacaaaaactacacagaaaagagttgaagaaaaaccttcaacttggagcactttatagagatctgaggagaagaccctcaccagagtactgggactgctggttgttgagaaggagttcctggtggaggacccctcagacatcactggaagttaaatggttcttggaactgatgcccatagggctcctccatctatgtacatggtcatttggtcccttttgctgagtgtggcacttaacattgctggtgagcctgtggtgggcaaaagtgacccagccatctactgatggcagggagggaaggttcctgcggaggaatgggtctgaaatcctgtgagccacctggtcccatgggccttggagtgtggaacaaggtagtagagaggaaagaggacaatgttttacctattacttatctcacattgatgacaggaatcaatcaaactatatcgtgctaaattgtaagacatctttaactttcttttttttttttttttttgagacggagtcttgctctgtcgcctaggctggagtgcagtggtgcgatctcggctcactacaagctccgcctcccgggttcacgccattctcctgcctcagcctcccgagtagctgggactacaggcgcccgccaccacacctggctaatttttgtatttttagtacagacggggtttcaccatgttggccaggctggtctcgaacttctgaccttgtgatctgcccgccttggcctcccaaagtgctgggattacaggcatgagtcaccgcgcccggccagcactttctgagatttacgcatgttgatacttgttttagtttttttaattgtcctacagagttccatgatattccatgaaagcctattgatatattttccagtacatggacattaggattgtttttaactttccagtgttgcagtgaacatgcgtatgccatctctccatatatgtttgcactttcctgtctgtgtgcctaggagtggaagggcccagctacatggtgagtcttctccagggtgctagggcagctcacagctcccaccaacagccatgtggtcctgttccctcagtggtgtcacattggaacattttggcccatctgattggtgtggaaaggtttttgctgttactttaattttcttttccctgattattggtaaggttgagcatcctttttgtaagtttactgctattcaggttttcttctctgtgaattacttgttggttcgttcttcctatcttcagcccatttttattgttttaggttgcttgatattttttgataaggattcattacctatcacatgcattgaaaaagctttttcccagcctgtggttagccatttttttctttctttaaggtgtcctttagtcattaaaaattattggccaggcctggtggcgcatgcttgtaatcccagaagtttgagaggccaaggtgggtggattgctttagcccaggattttgagaccaggctgggcaacatggtgacactgtctctacaggtacaaaaacatagccaggtgtggtagcacatgcctgtggtcccagctatttcggaagctgaggtgggaggatcgcgtgagcccgggaggtcgaggctgcagtgagctgtgattgtgccattgtactccagcctgggccacagagtgagaccctgtctcaaaaaaaaaaaaagaaaaaagaaatttaaaggtttttttttgagacagagtcttactgtgtcagatttaaaattcaaattcaaatttatcttaagatttaaaagattttttgagataattgtgaattcacagttgttagaagagggatcctatgtacagttacccagttccccccatggtaacatcttgcaaaactatatagtacaatatatatcacaggcaggatattggaaatggtatagtcaaggtacagaacatttccattgccacaggatattttatgttgtccttttatagccacatctacctccttcacagtctgacccccttctgtaacttctggcacccactaatcagttctctgtttctataattttgtcattcaagaatgttataaaaatgaaactatatagtatagtatgtaaccttttggggttggcttttttttttcacttagcaagattgcttggaaattcatccaagttgttgagcgtatccatagttcattcatttttattgtttattagtattccatggtatgcatgtaccatagtttgtttaatcattcacccattgaaggacatctgggttgtaccatttgttgaaaaggcaattttttccccgttgaattgcttttgcattgttgtcaaaaatcacttgggtatatttgtgtatgtctatttctggattccctattatattccatttgtctatgtatctgtccctccaccaatacagtctttttttttttttttttttttttttttttttttttttttgacagagtctcactctgttgctcaggctggagtgcagtggcacgatctcggctcactccaacctctgcctcctgggttcatgccattctcctgcctcagcctccccagtagctgagtagctgggactacaggcgcccgctaccacgcccagctaatttttttttttttttttttttttgtatttttagtagagacggggtttcaccatgttagccaggatggcctcgatctcctgacctcgtgatccacccgcctcggcctcccaaagtgctgggattacaggtgtgagccactgtgcccagctgtattccctattatattccattggtctatgtatctgtccctccaccattacagtcttcttctttttttttttttttaattttaaaattactattgttatttttgagacagggtcttgctccgttgcccaggctggagtgcagtggtgtgaatgtggctcactgagccttgacctgctgggctcaagcgatcctcccacatagctgaggccacagctgcatgccaccacacttggctaatttttaaaatttttgtagagatgaggtcttactgtgttgcccagattggtttctaactcctgggctcaagtgatgcttctgcctcagcctcccagattgttgggattataggtatgagccactgcaccccgcccttatttttttttaattactatgttgccaaggctggtgtcaaactcctgggttcctccgtcagcctcttgcgtagctgggatcacaggtgtatgcatagttttcagcatacaaattgtgtacatgttttgttagatttgcacctaagtaatttttttgaatagtttaaatgatactgtatttttaattttggtgtccacatgttgcagtatatagaaatacaattgatttttgaatgtttttgtgttctgtgaccttgttgaactcacttattatagaactgatataggactataaggagttttcttatggattctttggcattttctacatagacaattatgtcatctgcaaataagggcaattttattttttcttttccaatctgtatgccaaacttttttttttgagacggagtttcgctcttgttgcccaggttggagtgcaatggcgccatcttggctcaccgcaacctccacctcccaggttcaaacaattctcctgcctcagcctcctgagtagctgggcatgcaccaccatgcccggctaattttgtattttttttttttagtagagatggggtttctccatgttggccaggctggtctcgaactcccgacctcaggtgatccacctgcctcggccccccaaggtgctggaattacaggcgtgagccaccacgcccggcctatttttttttctttttttttttttttgagtcagagtttcactcctgttgcccaggctggagtgcagtggcttgatctcggctcactacaaccaccgcctcctgggttcaagcgattctcctgcctcagcctcctgagtagctaggattacaggtgcccgccaccacgcctggctaattttttgtatttagtagagatggggtttcaccatgttagtcaggctggtcttgaactcctgacccaggtgattcaccggcctcagcctcccaaagtgctgggattacaggcgtgggccactgcgcctggccactatactttttttctcactttattgcactagctagaacttctagcattatgttgtatatgaatggtgatagtggacattctttgccttgtttctgttcttaaggataagtcactcagtttgtcaccagtaaatacagtgttagctgtaggggtgtttggtagatgctctttatcaagttgaagaagttcccctctgttcctatttgtctgagagtttttttattatgaatcagtgttgaattttgtcagacactttctctgcatcaattggtatgaccatgtgattttttttctgtagcctgttaatatggttaattttcaaatattgagctgattaattttcaaatattgagctctccttgcatctctggaataagtaccacttggtcgtggtatatatttcttttaatatattgctgaattctgtttgatcatgttttcttaaagactttcgtgtctgttttcatgatagatactggtctatagttttgttgtaatatcttggtttgattttgatatcaggataatgctaccttaatagaatgaattggagccaagtatggtggcaaatgcctatagtcctagctactcaggaggctgaggtggtggggactgcttgagcccaggagttcaaatctagcttgggcaatgtagcaagaccccatttctaaaaaagaaaaatgaaaaaaaaaaaagaaaaataagtaaaaagttaaataaagaaaattcaatatattaaaacaaaatgaatcaggatgtgtttcctccttgtctgctttctggaagagtttgtgcctggcagtggctcatgcctgtaattccagaactttgggagtccaaggcgggtggatcacttgaggtcaggagttcaggaccagcctggccaactccttctccaaaaaaaagaaaaagaagaaaaagaaaagattggtagaacttaccgctgatgtcattcaggcctgtagatttctttttgtgggagttttaaaattacaaattcagggtcaggcgtggtggctcacacctgtaatcccagcactttgggaggctgaggtgggcggatcacctgaggtcaggagttcaagaccagcctggtcaacgtggcaaaaccccgtctctattaaaaatacaaaaattagctgggcgtagtggtgggagcctgtaatcccagctacttgggaggctgaggcaggagaattgtttgaacctgggaggcggaggttacagtgagccgagattgtgcactacattccagtctaggtgacagagcaaggctccatctcaaataaataaataaatttaaaaaaaaattacaaattcaatttccttaatatttttcttttcttttttttctttttttttctttttctttttcttttcctttcctttatcttttccttttcttttgagacagtctcaatctgtcatccaggctagagtgcagtggtgtgattatggcttattacagccttgaactgctgggctcaagccaaccttcttccttagcctcctgagtacctgggacttctgtcttaaaaaaaaattttatcctttctgcctctgtaaaataattttcttaatagaaattatatcatattggatgagttgtagtagtttgtattttttgagaggaatctgttcgtttagtttgattcatatttgtctgtgtagagttgtttatagtgtttccttatttttcttttgatgtctgcaatatctagtgatatctcctgcttcattgttgatgttagtaattgtcttctcttttttcttgtatcattcttgagatcaattttattaatcttttcaaataactagttatttgtttcaatggtttttctctgtttttgttttcagtttcattggggttttttgctttttattatttccttctgcttgcttttggtttattttgcttttttttttttttttttaataatgagatggagttttgctcttgttgcccaagctggaatgcaatggtgcattctcagctcacttcagcctctgcctcctgggttcgagcaattctcctgcttcagcctcccgagtagctgggattacaggtgcctgccaccacacccggctaatttttgtatttgtatttgtttgtgtatatgtatgtatgtgttgtttttgagacagggtcttgctctgtcacccaggctagagtgcagtggtgcagtctccgctcactgcaacctctgcctaccaggttcaagggattctcctgcctcagcctcctaagtagctgcgacttcaggcgtgcaccaccacgcctggctaattttttgtatttgtagtagagacggggtttcaccatgttggccaggctggtcttgaactcctgacgtcaggtgatctgcctgccttggcctcccaaagtgctagggttacaggcgtgagccaccatgcctggcatgtatttttagtagagacaagatttcaccatgctggccaggctggtcttgaactcctgacttcaagtgaacctcctgtctcagcctcccaaagtgctgggattacaggcatgagccactgcacccgcccgccaggcctcaaagcatttttctaagcctcattgttacagttgccacatgaatgtatctctatatatacatgtatacattttttttctttgaatcattttgaagtgagttgcagagtgtttgacacttcatccctaagtacttcaaaatacaattcataagattgaggatgattccctatagagtcttactaccatcatatcacctaagaaaaataacagtaaatcccatttccagtttacacgcaaaattcctcaattacccctttgggagctggactcatgggtttttttaaaaagtaaatccagaatccagtcaagagatacacattgtctgggcaagattgcttacctttctaatcctgggagactgaggtgagaggatcacttgaggccaagagtttgaggccagcctgggcagcatagtgggacactgtctgtacaaaagatttttaaaaactagctgagtggagtggtgtgcacctgaagtcccagctatttacttgagcccaggagttcaaggttacattgagctatgaacatgacactgtactctatcctgggccacagagcaagaaccttctctgtccccactcccctacccctagaaagatacacacatcaagtctggttgctgtctctaaatcgagaacagtcatcttatgtttagggatgtcagcatttggagagaccaggccagttgtttggcagaagatcccacattctagatttgtgtgattttctttgcatagctcccatatttcctgtaaattggaagttaggtctaaagcagtgccacccaacagaaatataacatgagccacatatgtcacttaaattttcctggtagccacatgaagaaaagcagattaaattaatttcaatcatatattttacttaatattttattgtttttttttgaggtcgagtctcactctgtcacccaggctggagtgcagtggtgcaatctcggctcactgcaacctccacctcccgggttcaagtgattctcttgcctcagcttcctcagtagctgggattacaggcacccaccaccatgcccggctaattttcatatttttagtagagatgggattttaccatgttggccaggctggtttcaaactccttacctcaagtcatccacccaccctagtctcccaagatgccaggatcataggcgtgagccacggtgcccgtcttgtttaatacatttctttattatttattctttgttaatacttattgtttacttaatatattttattgaatgtatctgactgtattcaaaatattactaatacatatcatttcagtttgcaatcaatattttaaaagtattaatgaggcattttacattcattttttatgaagttttcaaaatccagtgtatattttatatttaatggatcagctacatttccagtgctaaggagttgcacgaaactgttggtttctgtataagagaccatgggggtaagaggcttgatccaactcggggtagatgtttttgacagtaactcctggaggatagtatgtgactgaaccactggaattgctcaagtctaaacctgcttttctttttttttcaggctctgtgtgctccgggatggagcaggtgtgcagagggtgagaacccagctctgggaccaagtcacttgcttccttacttagcaagactatcgacttgagcaaacttggacctgggatgaggatgtctgtgggcctctcgctgctgctgcccctctgggggaggacctttctcctcctgctctctgtggttatggctcagtcccactggcccagtgaaccctcagaggctgtcagggactgggaaaaccagcttgaggcatccatgcactcagtgctctcagacctccacgaggctgttcccacagtggttggcattcctgatggcacggctgtcgtcgggcgctcatttcgagtgaccattccaacagatttgattgcctccagtggagatatcatcaaggtgagactggatataaagcataaatgaggaagagttctcattttccattttagttttggtggcttttccttttcaagtctaagcttcaccaattctgagctcagttcttccagtacccccttagaagagggacagccactgatgttcataagagaatccctatatactcagaatagcatcctaaactgtattcttgttcctattctgagggcatcaccatgtaatagcctttactctggaagttctactgaacactgatttagggatttgttggaaaggtctgtcacgtgtatagggaaaggttacctttaataaaacacagagttaaaccccaaaaaataggacttttatgctttgaacttactttttaaaataagatataaataaatataggagttctgctctgatttgctgatgtatgttggctaatgtaattgatcacttaagaaccaaaattagtacccaaacttcagccttgccccatatcctttggagaagccatccagagaacaatggaatctgaggcccgtgtagagaagagtgtcttggttgacccaggatagaaatcaggtgaaataggaagcttttgtgtgatgaagcaccatctctctgtctgagtttgtggaaccatggaatttcccctagatcttaaatgagtttgtttcatggacaggtgggtgggatgtacccctcaagttatgaacatcttctagagcagaagtcagcacacttcacccaagctggagtgcactggcatgatcatgtctcactgtagccttgacctcccaggctcaagtgatcctcccacctcagcctcccaagtagctgggactataagcacatatcagcacacctggctaatttttgtactttttgtagagatagggttttgtcatgttgctcaagctagtcttgaactcctgagctcaagccatcttcctgccttggcctcccaaagtgctgggattgcaggcatgcaccactgcaccaagctccaggcagtaaatattttaggctttgcaggccatatggtttctgtcagaactcctcgactctgcctgtgtagtgttaaagtagcctttacaatatataaatcaatgggcaataaaactttacggtggatactttttcttttttaattttttacacttatagtcccattctgacttgaaacagatttttgaatttcatatgtcaagaaagaaatattcttttacaatttttttttttgaggcagggtcttgctctgttgttcaggctggagtgcagtggtacagccatggctctctgcagccttaacctcccaggcttaagccttcttccctcttcagcctcccaagtagctgggactacaggtgtgcaccaccacacccagctaatttatttatttatttatttttgagacagagtttcgctcttgtcgcccaggctggagtgcaatggcacaatcttggctcactgcaacctccgcctcctgggttcaagtgattctcctgcctcagcctcctcagtagctaggattacaggcgcacgtcaccacgcccagctaatttttaaattttaatttattttaattaattaattaattttgagatgaagtctctctctgtcacccaagctggaatgcaatgacacaatctcagctcactgcaacctccatctcccagattcaagtgattctcctgcctcagcctcccaagtagctgggattacaggtgcgcaccaccatgcccggctaatttttgtatttttagtactgacggggtttcaccatgttggccaggctggtctcaaactccttatctcgggtgatctgtctgcctcagcctcgcaacacccagctaattaaaaaaaaatttttttttagtttgggcgtgatgacttacacctgtaatcctagcactttgggaggctgagggaggcagattgcttgagcccaggagtttgagaccagcctgggcaacatggtgaaaccccaactctacaaaaaatacaaaaattagttacaaaaaattttttttagatagggtcttactctgtctgccaggctggtctcaaacttctggttcctgccctacagcattccttctctagaggtgtggcctacatgtgaactaaaagtattctgagacctatactttgttaggtattttctgtatgatctctgcattcagacttctacatacatttagtgctctggctttctgttggtgtgtttaaaccaccaaaacagtggtttaactcaaccagcttgttttactcaacattttttggccaggaattcagagataaggaaccttatctctgtttcacatggtactaggtagagtggctcacctggggctggggaattcacttctaagttggctcattcatggctggcaagttgatgctgcctgttgacagggagcttagctggggctgttggtcagtgtccttgattcctcttcatgtagacctctccatgggctgcttaggtgtcctcaaagcacgatagatggattttaagattaggtatttcaagaaataggaaaggaagctgcccaatctcttaaggcccagaacttgcccaacaacacttccattttactccattggtcaaagcacatatagactctgatgggtgtttaccagcttgcccccgtgacccgtaagccccaggcttctagattagaaatggccacaagttctatgccactctttccttgcagaggtgagtctgtgcccttttccctgaatctgggtggacctccccttcagcctgctcccttcttgtgttcgcctccttttccctgttggtcaccttctttttaagccgtggcttgttctcagagtgaccttgtggtctctggggcaaccgtatttctgaagatcttggcccatgtagcagctcacatgtagcagttcacagagctcttcctagtttgcagagtgtttgcataaagtttccttgtcatctttgtaatatcccagcaagctagatgctaatctgaccattagatacagagtggtggctctggaaggtacatttcttgctcagcttcagatttaatcctgaatatccataccctgcattggttgcctttgttccagtagccattggaatgttttacgtggattaatcttggccagaagtgccttgaactgatacagcaaactagatatttgttgtatttggcagagagatgtttaacaggcttatttaccaagggggtgaagagattttactgagaaaacaggattttatctgagcatatttatctgtggaaagcagaccatttagtagctgatgagcttgtagaaaaacagatgaagatgtgtgactcttcgttccagtcttaaccaccgggattatatgggttggggagtcagaaggtcagaaagcctgatcttgttcctagagctttggtttctgcatctgtaaagcaggatttagaaagtctttatattaaaggaatttttttcttattataataatgatgcataaatgtacattgtggaaaatatagaaagggaaaaaaaatctgtggtttctaccattcagagtgaagtcctctaccgttttctatgctcatcaagagatggtcatgccacatacacacacagacgtcttaacatattagacagacctaggatcatagtggatatattttttaaccttttttttttgagacagagtctcactttgttgcccaggctggagtgcagtggcacagtcccggctcactgcaacctccacctcccgggttcaaatgattctcctgcctccatctcccgagtagctgggactacaggcatgcgctaccacacctggctaatttttgtgtttttttggggggatggagtttcgctcttgtcgcccaggatggagtacaatggcgtgatcttggcctactgcaacctccgcctcccgggttcaagcgattctcctgcctcagcctcctgagtagctgggactataggcttgaaccaccactcctggcatatgtgtgtgtgtgtgtgtgtgtgtgtgtgtgtacacatacatagacacacacacacatatatatatattttttgagatggaatcttgctctttcgtccaggctggaatgcagtggcgtgatctcagctcagtgcaacctccgcctcctgggttcaggctattcttctgcctcagcctcctgaatagctgggactacaggcatgcgccaccacacccggctagggtttcaccatattggccagactggtctcaaactcctgacctcgtgatccgcccaccttggcctcccaaagtgctggggttacaggggtgagccaccttgcccagcccacgttttgtatttttagtagagatggggtttcaccatgttggccaggctggtatcaaactcctgacctcaggtgatctgcctgcctcggcctcccaacgtgctgggattacaggaatgagccactgtcccgggcctattttttttttttttttaacatttttcattcactgtagcttgagtatttttttacctgtagtcattaaatgttatgtgggaatgtaacttttaatggctgcctaatattcttgtgttgttttttttttttttttgagacagggtcttgctctgttgcccaggctggagtgcagtggcactatcatggctcactgcagcctccacctcctagcttaagcaatcctctcacctcagccttccaagtaactgggactataggtgtgggccaccacacccaggtaatttttaaatttttttgtagagatgggtctcactttgttgcccaggccggtcttgaactcctaggctcaagtgatcctactgcctcagcctcccaaagtgctaggattacagacatgagcatcacgcccagcctgcccactattcttgagtgtgtgaggaacatttcagatattggtcctaaggatgcttgttgaggcgaccccagtcatcttgggcccactggtactgcccttcatccaagctactgcttgcttacttcttcctaggctccccctgcctttgttcttgacctctcaatttgttctccatattgagtcaagagatgtctttatctttctaaagcttaaatctattcaaaatccctttttactgagctgcaccaagaatcgaaccccatatgatctggcctgtgacctcctctcccacatctttttctttgtatactttgtcccagccacactggtccttttctgcccagtgaacacacctagcttagggtccaccccaagcttttgattctttcttcttttgtcatgggtacagccatatctttcaggctcaacttggacatcatctgttggagccctttccttccaccctggtaaaagcagctttcccacaaaactctgtgtcatcttcttcttagcagatttctgtatttgaaattcttgttttttgttagtcatgtttgccttccatcacatagtaggccctcaaatgtttgtaggctggcaaagggaatgaggactcatttagcacctgcaaacctgttttggattgtcaaagcctgccttgctgtatgcagggagaaatgctagcctgtgctggggcagcaagagactaagttcacctgctgccccacagtgtactatggtcttgccgtgttttgaggcctcaggccctgtgacacacacactttcaaatgacttcttgttgtattttcacattggaaagtggccccaccctgtccctctaacacttgactgtgtgtttattgatccattattagtacaaactcactgtttcctaatattcaatagtttattgctcatcttaattattgtggtgttcaaattgtcccagatttgaccattgggagcccctttaagttggttcctgtattcttgtgatatgcccctgtcaatcattaagtgcttccttactttctgggataagatgctccaggcctgtcttgtattcaccctccctcagccatttcttcaaggagcctgattcctttttgtggtgaatgttattgggggttcagatctgggtgctaggtgagttcattgccactgggatttccttgcttctttgagccgttcagcagatagtgtggctccatttttagatgacaaagtggtagctaagtgacttatctcggagcacatagcttgtagggacagagttagtttgtagggagcacccaagaggcttttttttttttttttttttaattgagacggagtctcgctctgtcgcccaggctggagtgcagtggtgctatctcggctcactgcaacctccgtctcccaggttcatgccattctcctgcctcagcctcctgagtagctgggactacaggtgcctgctaccatgcccggctaattttttgtatttttagtagagacggggtttcactgtgttagccaggatggtctcgatctcctgaccttgtggtccgcccgcctcggcctcccaaagtgctgggattacaggagagagccaccgcacccagcccccaagaggcttcttgagcctgtagtatataaggtcttatcttcaggtaactgacctgtgtttattttgtgtgtcagcatgctttggaattataatttaatgctttgttctagtcagttttagaagacttccctcgtagttgtctgttaccgtgcctctgacctctgacactgcagggctgtggaagagagagacacactgggtatgccttgacatggatggtgtcacatgtgatgagacgggtttgtacaacctgccatgcatgtgggcatctttgagccagagcagaagctgacctatcattgggcccaaaactgattgctaagtaaatggctggtttacagttctggcttttggaatgaaggctgcaggaccacaggtttggaagatcagggccaaccttgatgaaagtgaaaggagagtctgagtgaaaggtgatgtctggctggtaagctatcattgttccctgtgtagggttctagatacttggcataggacctgtttcgaagtagatgcctaattaaaggcttgctatgtgataaagcattaacagaggtggagcaacaacggtaagacatgtgggacagtggtgggttgcagagctccatgtggggaatttgagaagttgttgggagcacatggagttgggctcctcagcagagaaaggccagtgcccacatgtggcagggttgtcaatttgagtgaaagtaaatggagagagaagtgggtccgtaaggggcttttcaaaggctttcttccccaagtatcagaggaagaagaagctggtgaagaactgaggtaggaggtactgagcctggcctgcttcctcctaagccccatgtgggatgtccagatgagggttggtctatttgggcagggctgagttgccaaatgaagactcaggtggaacgtgatctgcatggtctgtcccaagacctggtgagattagatggcatagttgtcatacttgctgattggttaggggatatgcatgggggttgacggtagaataatccagtgtttatagcacacttagatgctggtctgttgaagggctagaaaattaagttctcattctaagtgagctgtgttgactgcctgaaaagcctggcctgacctgtgtgggcttctggttactttatttcaggaggttgtgctgcctggtgtcagtctgttgatatacccaacaaagcgcctgaagcaaatgcttcgctacattttatattggtgtatactttacacgtcagtctgcagggtcaggagaataaagaagggacctgcctgcgcagagggtatagccccaagatcctggctcttctgctctgccccacacctgacactccttcatgttctgacagctcttgtccagtctcagcctggccagcacttgttgcttaaccaatgctgttctccagttctgccttgagaattgatattctgttattgaccccagcttaactcacacatggactgctttgaccagacgtgtgagaaggggctatgggctccctcaaggtcctcatggccagcatagcttttttgagagacctgtgccatggggcccctgtctcctctcttgtggccttaggaaaccctaaagcagatagtcttgatgtttgctcccttgaatcagactggatgcctgtatacaaagctcagcccagctcttgactgtccttggctctcacagctacttttggagctgagaggaccctttctccttatcagggtctgtggggatgggtcccacagaagccaacctggccttcactcagtggatcctggcctgtcctgggctggcaacagtatgagccacccttgtctcccttgggtttggtgctggatccctgcaggcacctctcctctgacttgagtgtgggactggctgagaaatgtgattatatgccaggagatgttctaacctctcctcgaaggtggtcagggagagacatctttacatttcatgaaatgcccaggctgcccctcagatgtctcattttggtagagcctgcaaggatggcttttcatccctgcttccctttagccttcttgcctgcagacaatgtggaccttccctcagcccaagatgttggcaggctgggagcagcccttcctgggactgtgctctcagctgctggcacgggcccccaattgttcccctgagaacaatgggcactctctttggctaggaaggggagttcatgaaaggagcatttctttggatgcttgagagctttgtggcagccccgcctgtgtgagatgagctgcagtttcttcctgccttgagtgggtgttccgcatttctgaatggaccccttgtgaacaaagcacaccgggaaatgcgggttggcgatggaaggcatccttgggggtgggctgtcagaatggcatttgcccagattcatcaactcaaatacttagtgaaaatataggcttctatgtttaaaaaaatcactgacaaagactgaaagagaacatgacaaagtaaaatagatgatgtcagggctccagattgaaggactgattctgaggattttattagtggctctaactatgttaagctgccctttacttttttggggaaaaagactaatttttgcttttagatgagaacagtgaacatgagataaaatgctttgtagctcagaccagaagggcattgactgggctgaacagtgtgttcagtattgatcctgtggcgttggtgtttgtggcaggggccaggttctgctttgaggtttgcatgtctaacagcaggaccaatgatgatcccttgtgggtgtgactctgctaaggccgcatgtacttaacttccctcatgattttttacctcaggtggggacaaaggcctggccctctgaccttaagctagaggctcttcctgttggtctgtgccatctccctgcagcacagccatgtgactgcccatgttcctcattagcagaaggccacagagcagatttatctcattgtcttagtccatggcacagacacaggataaccctgagtgtgagtcagcaccaaggctgatactccatcagagggtccatctcctgcttccctgagcagaggacacacagtcagcttgcaatgaggaggccttgactgcctcatgtgggagtgcctccagggtgttgtctatggtacccagccatagatggctgcaggttggcccagctctgcagcctgactagggatgagggagctgaaaggtcgggaattgatgaccaggtctgaaggaaagcagggactttgccaacgcaggcctctgcaggtccagcattgggatgtcacggggcagcagtctgtatcactttgaaatggatctgttgggggacacggggaagggcccagcccacaccttaagggctgacatgtccagaggtattgatggaaggtgccaccaccaaggcccaaagttccctccaaaagatttgtagtgagaaggaatgctcaccaaatcagtttctcgattatgttattcttaggatccctctttactggccatcatcagctgtgaaagtgctcgtacatctgtctagagtctttgcttgccatttctaagtcctgcaactcctgcatggataagacatcatcttgtgggccctgaatgatacagcttgtgttttcttggtttcataagccaattataattatttggccctagagagagcctaattcttcagttttgtttttcagctatgcataactgactcagactatgggtggaaacctgcttttatgagaactaagtaatagaagctcctccagccatttgctctttcttcaggtgtggaatggtactggcttggggtgagagactttgcttgagtttcatggtgtttttttttgttttgtttttttgtttgtttttgttgttgttgttttttgagacagagtctcgctctttgcccaggctggagtgcagtggcgcgatctcggctcactgcaagctccgcctcctgggttcacgccattttcctgcctcagcctcccaagtagctgggactacaggcacccgccaccacacctggcttattttttttgtatttttagtagagacggggtttcaccgtgttagccaggatggtctcgatctcctgacctcgtgatccacccgcctcagcctcccaaagtgctgggattacaggcgtgagccactgcgcccggccgtctttgtttttttgagacaggtcttgctctgtcacccaggccaaggtgcggtggcgcaatcatagctcactgcagccttgacttccccaggctcaagcaggcttcccacctcagcctcctgagtagctgggaccaccacgcccagctaatttttcttttttgtaaagacgacgttttgccgtgttgcccaggctgatggtgtttagtgcctacaggtgctgtatctttatcaaagtcagtgtttgatggtctattgtgtgcagagggcatcagtaaagcagctggagggagtgtcccagagactgaggagtgaccaaaatgttcaaatttggcagttccctggtcattggtcatggtgatttattgtgggcatcacagttttagacctttgtttttttttttgagatggagtctcgctctgtcgcccaggctggagtgcggtggcacgatcttggctcactgcaatctccacctcccgggttcaagcaattctcctgcttcagcctcctaagtagctgggattacaggtgcgcaccaacatgcccggctaattttctttttactttattttatttttttttgagacaaagtctcactcttgtcccccaggctggagtgcaatggtgtgatctcggctcactgcaacttccgcctcccgggttcaagcaattctcctgcctcagcctcccaagtagctgggattacaggtgcctgccaccacacccagctaatttttttgtatttttagtagagatggggtttcaccatgttggccaggctggtcttgaactcctgacctcaggtgatccgctcacctcagcctcccaaactgctgggattacaggcgtgagccactgcgcctggcttttttttgtatttttagtagagatgggctttcaccatgttggccaggctgctcttgaactcctgacctcgtgatccacccgcttcggctcccgaagtgctgcgattgcaggcttgagccaccacgcccgcccccctcccaccccttttttttttttttaagactgcatcatggtatgttgcccaggctgggctcaactcctggcctcaagtgatcctcccgcctcagcctcctgagtagctggggttataggtgtgagccaccatgcccagctcagtctttggaactttttgtggatctgcccaggttttgtggttttgattcttaatgttttgggatgcactttgtgggtcaggatttcagaagctggttataggcttttcaagatctttttttccttaatgctagacttactttctatctcagaagcacatcgtctctaagggttgccgaaaccagaaagttttctggcctttttggtggcctgtgagctacagcctgtgatctccttaaatcaggctttcttgggcagtttctgcctcctgcagatgtgcctagtaactgtctgaaggcttctttcaagacagcaactgtaaggtcagcaggccttgcctctcccagctccaaggcagtgttggtgtttggtgttggctggtagagagacctgaaatgctggaggagttccacggtgggaccagcttgtcaccccaaactcatgtgcctctgtgcctctgctgctaaggacctcagagccccaattcctgcctcttttctgcccttcctggcctggcagcccttagaggattagttgtgggtggctgtggtatagtaggcagaaatctttataccaggcaaaccaaggactctaaggatagtcaaaatcccatgtgtaaatgtgccaggatctagtgcacccattttattaattatagagacaaagtctcactatgttgcccaggctggtcttgaacttctggcctcaaacaatcctctcgccttggcctcctagagtgctgggattacaggtgtgagccactgtgcctggcctagtccacctgttttaggttgaagaggtgaaagcaggtctttgggttctcacctgcagcaggtcccccacttcccccatgccccttagtgttttcatctacttctggtagacaagtgttgacaggcaactctctgagcttccccagcctcagctttgtttctctatatgattttggctccctcattgcctgttgcctccccacttaccttagatgctttgagcttctgttttgtggtatgaacagggagacaggaccccactgtgcactgggtccaaggtcagttgggaaggagaactagggagaggagcctggacatgccctgggcccctttgtgcagtagcctcaaattacttactggttcttctcagagcccatgggagccataggaaccattattggcagagtccatcatgtgcctggcactataatcatatgaggttgggattgtttccctgattttacagatgacactggggccaaggttgggtcaagcgccagccagcctggagctgggattcgcagtgaaagatgggccttctcatggagtagaagaatgaggattgttatccccattgttatggggatgagtcctggcttgtcattgggctgcatctgtgagaaggaactttcatatcctgtttcacccttaggatctgagaagaagagaagtgatccagagcctataagttttgaaagctgaggaggtatccagagttcccgtggactgagggcctcctgctttgttagggtagagcaggtgctttatcccctagcacctccgggatgagctaagccctgagctgagtccctttgggagggtggggctcctagtggaatcctttggggactgtggacactgccaaaccttcaggcatgttcagactttccaggtaggggctttccccaaatggccttgaaaatgcagaagtgccagtgtgcctgtgacttggccaggttccttgtggaaattaggtttgttttgcttcctgtagcccttctattaaaatgaatcatggctgggcacggtggctcacacctgtaatcccaacactttggcaggctgaggcaggaggatcactgaagcctaggagttcaagaccaatctggacaacataggaagacccatctctacaaaaaagtaaatattggccaggcctggttgtacacacctggctcaagtagtcccagctattcaagaggctgaggtgggatgatcacttcagcccaggagtttgaggttgcagtgagctgtgattgcaccactgcactccagtctggtgacagtgagtgagaccctggctcaaaaaaatgtatatttaagggctgggcatggtggcccacacctgtaatcccaggattttgggaggctgaggcaggaggattgcttgagcccagaagtttaaagccagtctgggcaatataatgagaccctgtctctacacacccacacacacaaaatacccgggcacgtgcctatgtcccagctacttgggaggctgaggtgggaggattgcttgagcctgggaggttgaggctgcaatgtgccatgatcacactactgaattccagcctaggcaacagagtgagacccttatatatacatatacatatatgtatataaagaatcattgccactcaaagtgctgcttgggcctgatgtcaccagtaccactcaaagtgctgcttgggcctgatgtcaccagtaccactcaaagtgctgcttgggcctgatgtcaccagtaccaagactggagatgcaggggttttagaacattcaggttagtactttttcttcctgagtagtacccatgatcctggagtgactgcctgcttcagggctgtagatctagacacctgtcctgcagccaggtagtggccgggacttcaggaccctggggagccaaaatttgcagaggggaaagcaggtgactaggttggagagacttggctcttatattagtctgttcttgtggtgctataaagaaatacctgagactggtaatttatagagaaaagagttttaattggctcatggttctgcaggctatacagggaatatagtggcttctgcttctggggatgcctcaggaagcttccaatcatagtggaaagcaaagggagagctggcgcttcacacggctggccggaacaggaggaaggctgggggaggtgctacacacttttttttttttttttgagacggaatctcgctctgtcgcccaggctggagtgccgtggcgtgatctcggctcactgcaggctccgccccccgggttcactgccattctcctgcctcagcctcccgagtagctgggactacaggcgcccgccacctcgccccgctaattttttttatttttagtagagacggggtttcaccatgttagccaggatggtcttgatctcctgacctcgtgatccgcctgcctcagcctcccaaagtgctgggattacaggcgtgagccaccgcgctcggcctttttttttttgagatggagtttcgctcttctgcccaggctggagtgaagtggtgcaatctcggctcacttcaacctccgccctctgggttcaagcgactctcctgcctcagcctctcgagtagctgggattataggcgcctgccagcatgcccagctaattttcgtatttttagtagagacagggtttcaccatgttgaccaggctggtcttgaactcctgaactcaagtgatccacccacctcagcctcccaaagtactaggattataggcgtgagcctctgctcccggcctacacacttttaaacaaccagatcttgtgagaactctgtcatgagaacagcactaggggggtggtactaaacgatccatgagaaatcacccccatgatccagtcccctcccccagaccccacctccaacactagggataataatttgacatgagatttgggcagtgacacagatgtgaaccatataagctctgtttttctgacatgacttgccccaaagacatgggtaaactttacatggctgcaaagccatgggtagacaatagtaaaagaatttggtcacgtgcagtggctcacaactgtaatcccagcactttgggaggctgaggcagccagatcactggaggccaggagtttgagaccagcctgggcaacatggcgaaatcccatctctaaaaaaagaaaaagaaaaaaaaaattagccgggcatagtggcagtcacctgtggtcccagctactcaggaggctgaagctggagaaacatttgaacccaggaagcagaggttacagtgaactgagatcgtgccactgcactccagcccaggtgacagagtgagactctgtctcaaaaaataaataaataaataaaattaaataaattgtgaaagaatttgttctcagtagtcaaaataaagctcatttctcatctcccatctcccaatttgaaattgagcattataacttgctttggtgaaacctgacgttttctttagtgtttattgtttgttacataatattaacatgtttttaagttacttggcatagttaaaataagtgtatggctttcaaggatggcttcgctgtgggagccttcctatagaatggcctgagtttgttctgtaggaactgcctgatagcagaactttggctgttggggtcagcagaataggaagtgagccaggctgggaagccttgagaaggcagggcccttctctattttctgttaaaaagtgcccttgtggccgggtgcggtggctcatgcctgtaatcccagcactttgggaggccgaggtgggcagatcacgaggtcgggagattgagaccatcctggctaacacagtgaaaccccgtctctactaaaaatacgaaaaattgccgggcgcggtggctcacgcctgtaatcccagcactttgggaggccaaggcgggcggatcacgagctcaggagatcgagaccatcttggctaacacggtgaaaccccgtctctactaaaaatacaaaaaattagccgggcacggtggcgggcgcctgtagtcccagctacaggagaatgaggcaggagaatggcatgaacccgggaggcggagcttgcagtgagccgagatagcgccactgcagtccggcctgggcgaaagagcgagactctgtctcaaaaaaaaaaaaaaccaacaaaacacgaaaaattagccaggcgtggtggcgggcgcctgtagtcccagctacttgggaggctgaggcaggagaatggcgtgatcccgggaggcggagcttgcagtgagccgagatcacgcccctgcactccagcctgggtgatagagtgagacgctgtctaaaaaaaaaaagtgcccttgtatagttgaagacagacttggagaggcaacaggttgctgacttatcaacactgatggagcgcctagccactcaggaatgtcccatggttctagccagccatttggctcccttcttctagtccctctcaaccttgttcagtctcctctgcagttggcttctccttagttggctttacccagacctctattccaggccttccctgtcacctttcttcatcctccctctgccatgtgagctcgtgtcctactggtggccattgggatggagtagagttaggaaataaccctcaggtgaccaaaaaccggggtccacaccctaattcacctactctccacctctcaggacccctacttctatcccactcctgtaaaacatctcatgggccttacttatttgcttcatggtggttttttgtttgtttgtttttgcaaaacaagagcattcaacctttattttatgtgtttatatacggatgtggcagttttatttaatataaatgaactgaaaaatgtaaagcttagatttttcagccaaaacatttgaaatagtgtgatttttttttttttttttttttttttttgggacagagtctcactctgtcattcaggctggagtgcagtggtgtggtctccgctcactgcagcctctgtctcctgggttcaagccattcttgtgcatcagcctcccgactagctgggactacaggtgtgcaccaccatgcctggctaatttttgtgtttttagtagagacgggattttgccatgttggccaggctggtctcaaactcctgacttcaagtgatccacccgcctcaacctcccaaagtgctgggattacaggcatgagccaccacgcccagccaataagtgtgatttttatggttaaaaaatatttttaaagaaaaatatatttagcatttttcatgaatttgaagacacccatgtttacagatgttttaacatttctgatgtttgatggtgagtgacagggtgggagattcttaattagatgatggcacatcttagagttgatgcaatgtggtatcacaaaagaaacactatttgctaacccttaatgagtggctcagagagcaattaggaaatgataaccctgataataataacgccttttttttttttttttctgagatggagtctcactctgtcacccaggctgggttgcagtggcgtgatctcagttcactgcaacctccgcttcccaggttcaagcaattcttatgccttagcctcctgagtagctgggactacaggtgcctgccaccacatccgactaatttttgtacttttagtagagatggggtttcgccgtgttggccaggctggtctcgaactcctgacctcaggtgatctgcccaccttggcctcccaaagtgctgggattacaggggtgagccaccatgcctggcccaataataataattcctaacaatgtcagtaatctcatggttaaaaaaaattttttttttgaaatagagatgggggtctcactgtgttggccagggtggtctctaatgcctgctggcctcaagcaatcctcccgccttggcctcccaaagtactgggattataggtatgagctaccatgcccagctttctcatacatttttgctgggtgtaggaaacctgtttaaattagtttaaaggggggaaattatctagtttctgataaggctgctgcctggacacctgggtacaagcctggggtctcctttccaaatcactcaagtactttgttttttggcaggaggaagcccagggaaccagaggcactggggaatccagcagtcagtggctttagctttcctgccacagggagggggaagcattttagggtccccctattgataagcagtggtcatgaagggcagtcctaagctgagtctgggagtgtgatgtactgtgttttggccaatttgtctctggtacttgttataggacaatggagatgagagtgccttcaggccaaccagagaatggggggtgtcacttttcttgcattggggcaggagtaggtgtttcccaaaagtgaaaggagccacagatggggctggggcaagagctaagtcatattttcctcttgtcagctgttggtggaggtttctatggtggcatttccttgggtgctctgagtatgaccagttatatctctgtggaaagggacttccacaacaaaagaagtctgggagatgctgttgagttggaataaggtgatgagctccttaggcctgcttctgtgcctggtctctccaagggcagaagaggtctctgtgtatttcctgtacttgattgactgtagaacctctctcttttagagagaccagagctccttgggattcctttagtaagcactattctagaatagttgattctagtctctgctccctgggtaccacagtttgtcttgagatttgagaagcagggtaaatgaaaacattagatacaactaactctctttgctacacaaatgtgccccactacacttgaatgtaacgtgatgttgtaatgtgagtccttcagagcgttgagccttcccttgtacccagacctgtgtgcatctccactttggggcaggaatggtcctccaggccaggcatgtgacctgagcaaagatgtggtgtctgcagagggccggggagaagtctgaggcaagggtggaaaggaatgctgagggctggaatgtgacttgattcttcaggtagaatgggcaagtaggtggcagggcgtgtcactgttataaaatccacaacagtcgtgagctccatggcatcagttcttgggaatgagacatgtgcttgagtgccagcactgctgtctccccactgtgtggccttgggtgagatatttgcctcccaagttagcccatctcatagccctagtcttgtgacaggtaaataaactcagttgtgtctctctaggggggaggaatcagcttccccagcaggcattctgaattataccttaaacctgtcacacaattcaggttaactgttgtgatcatattcaggttatgcagtgacaatagtatttttaatttatgcttgtgtctcttctaggtatcagcggcagggaaggaggctttgccatcttggctgcactgggactcacagagccacaccctggagggcctcccccttgacactgataagggtgtgcattacatttcagtgagcgctacacggctgggggccaacgggagccacatcccccagacctccagtgtgttctccatcgaggtctaccctgaagaccacagtgagctgcagtcggtgaggacagcctccccagaccctggtgaggtggtatcatctgcctgtgctgcggatgaacctgtgactgttttgacggtgattttggatgccgacctcaccaagatgaccccaaagcaaaggattgacctcctgcacaggatgcggagcttctcagaagtagagcttcacaacatgaaattagtgccggtggtgaataacagactatttgacatgtcggccttcatggctggcccgggaaatgcaaaaaaggtggtggagaatggggcccttctctcctggaagctgggctgctccctgaaccagaacagtgtgcctgacattcatggtgtagaggcccctgccagggagggcgcaatgtctgctcagcttggctaccctgtggtgggttggcacatcgccaataagaagccccctcttcccaaacgcgtccggaggcagatccatgctacacccacacctgtcactgccattgggcccccaaccacggctatccaggagcccccatccaggatcgtgccaacccccacatctccagccattgctcctccaacagagaccatggctcctccagtcagggatcctgttcctgggaaacccacggtcaccatccggactcgaggcgccattattcaaaccccaaccctaggccccatccagcctactcgggtgtcagaagctggcaccacagttcctggccagattcgcccaacgatgaccattcctggctatgtggagcctactgcagttgctacccctcccacaaccaccaccaagaagccacgagtatccacaccaaaaccagcaacgccttcaactgactccaccaccaccacgactcgcaggccaaccaagaaaccacggacaccccggccagtgccccgggtcaccaccaaagtttccatcaccagattggaaactgcctcaccgcctactcgtattcgcaccaccaccagtggagtgccccgtggcggagaacccaaccagcgcccagagctcaagaaccatattgacagggtagatgcctgggttggcacctactttgaggtgaagatcccgtcagacactttctatgaccatgaggacaccaccactgacaagctgaagctgaccctgaaactgcgggagcagcagctggtgggcgagaagtcctgggtacagttcaacagcaacagccagctcatgtatggccttcccgacagcagccacgtgggcaaacacgagtatttcatgcatgccacagacaaggggggcctgtcggctgtggatgccttcgagatccacgtccacaggcgcccccaaggggatagggctcctgcaaggttcaaggccaagtttgtgggtgacccggcactggtgttgaatgacatccacaagaagattgccttggtaaagaaactggccttcgcctttggagaccgaaactgtagcaccatcaccctgcagaatatcacccggggctccatcgtggtggaatggaccaacaacacactgcccttggagccctgccccaaggagcagatcgctgggctgagccgccggatcgctgaggatgatggaaaacctcggcctgccttctccaacgccctagagcctgactttaaggccacaagcatcactgtgacgggctctggcagttgtcggcacctacagtttatccctgtggtaccacccaggagagtgccctcagaggcgccgcccacagaagtgcctgacagggaccctgagaagagcagtgaggatgatgtctacctgcacacagtcattccggccgtggtggtcgcagccatcctgctcattgctggcatcattgccatgatctgctaccgcaagaagcggaagggcaagcttacccttgaggaccaggccaccttcatcaagaagggggtgcctatcatctttgcagacgaactggacgactccaagcccccaccctcctccagcatgccactcattctgcaggaggagaaggctcccctaccccctcctgagtaccccaaccagagtgtgcccgagaccactcctctgaaccaggacaccatgggagagtacacgcccctgcgggatgaggatcccaatgcgcctccctaccagcccccaccgcccttcacagcacccatggagggcaagggctcccgtcccaagaacatgaccccataccggtcacctcctccctatgtcccaccttaacccgcaagcgcctgggtggaggcagggtagggcaggggcctggagacgacatggtgttgtctgtggagaccggtggcctgcagaccattgcccaccgggagccgacacctgacctagcacacactgacacaggggcctggacaagcccgccctctctggtcctcccaaaccccaaagcagctggagagactttggggacttttttatttttattttttgcctaacagcttttggtttgttcatagagaattcttcgcttcatttttgatggctggctctgaaagcaccatgtggagtggaggtggagggagcgaggaaccatgaatgaactcgcaggcagtgccgggcggccccctggctctctgcgttttgcctttaacactaactgtactgttttttctattcacgtgtgtctagctgcaggatgtaacatggaaaacagtaactaaagattaaattcaaaggactttcagaagttaaggttaagtttttacgtttaatctgctgtttacctaaacttgtatgtataatttttgggtgggtatggggaattgctttgctaaaaataagctcccagggtgtttcaaacttagagaagaccaagggacagtattttttatcaaaggaatactattttttcacactacgtcaacttggttgctctgataccccagagcctgattgggggcctcccggccctggctcacgccaagtccctggtgctgggtttgctctcccgctgttgccaggggctggaagctggaggggtctcttgggccatggacatccccacttccagcccatgtacactagtggcccacgaccaaggggtcttcatttccatgaaaaagggactccaagaggcagtggtggctgtggcccccaactttggtgctccagggtgggccagctgcttgtgggggcacctgggaggtcaaaggtctccaccacatcaacctattttgttttaccctttttctgtgcattgtttttttttttcctcctaaaaggaatatcacggttttttgaaacactcagtgggggacattttggtgaagatgcaatatttttatgtcatgtgatgctctttcctcacttgaccttggccgctttgtcctaacagtccacagtcctgccccgacccaccccatcccttttctctggcactccagtcccaggccttgggcctgaactactggaaaaggtctggcggctggggaggagtgccagcaatagttcataataaaaatctgttagctctcaaagctaattttttactaaagtttttatacagcctcaaattgttttattaaaaaaaagatttaaaatggtgatgcttacagcagtttgtacgagctcttaagtgttgattccatggaactgacggctttgcttgttttgattcttttccccctacttttcctaatggtttaaattctggaattacactggggttcttttgccttttttagcagaacatccgtccgtccatctgcatctctgtcccatgactcaggggcgcccactctgcttcgattctcctcctgtggaagaaaccattttgagcatgacttttcttgatgtctgaagcgttattttgggtactttttagggaggaatgcctttcgcaataatgtatccattccctgattgagggtgggtgggtggacccaggctccctttgcacacagagcagctacttctaagccatatcgactgttttgcagaggatttgtgtgtgctgcctcaggaggggagggctggtaggagggggggagaggtctctgtcctactgctctccagagggcatttccccttgcgccttctcccacagggcccagcccctctcccctgccccagtccccagggggtactctggagtgagcagtgcccctgtgggggagcctgtaaatgcgggctcagtggaccactggtgactgggctcatgcctccaagtcagagtttccctggtgccccagagacaggagcacaagtgggatctgacctggtgagattatttctgatgacctcatcaaaaaataaacaattcccaatgttccaggtgagggctttgaaaggccttccaaacagctccgtcgcccctagcaactccaccattgggcactgccatgcagagacgtggctggcccagaatggcctgttgccatagcaactggaggcgatggggcagtgaacagaataacaacagcaacaatgcctttgcaggcagcctgctcccctgagcgctgggctggtgatggccgttggactctgtgagatggagagccaatctcacattcaagtgttcaccaaccactgatgtgtttttatttccttctatatgattttaagatgtgttttctgcattctgtaaagaaacatatcaaactaaataaaagcagtgtctttattacaacgc

SEQ ID NO: 8 - DNA, 3397 bp, Homo sapiens
aggggccgcggagccgcggctaaggaacgcgggccgcccacccgctcccggtgcagcggcctccgcgccgggttttggcgcctcccgcgggcgcccccctcctcacggcgagcgctgccacgtcagacgaagggcgcagcgagcgtcctgatccttccgcccggacgctcaggacagcggcccgctgctcataagactcggccttagaaccccagtatcagcagaaggacattttaggacgggacttgggtgactctagggcactggttttctttccagagagcggaacaggcgaggaaaagtagtcccttctcggcgattctgcggagggatctccgtggggcggtgaacgccgatgattatataaggacgcgccgggtgtggcacagctagttccgtcgcagccgggatttgggtcgcagttcttgtttgtggatcgctgtgatcgtcacttggtgagtagcgggctgctgggctggccggggctttcgtggccgccgggccgctcggtgggacggaggcgtgtggagagaccgccaagggctgtagtctgggtccgcgagcaaggttgccctgaactgggggttggggggagcgcagcaaaatggcggctgttcccgagtcttgaatggaagacgcttgtgaggcgggctgtgaggtcgttgaaacaaggtggggggcatggtgggcggcaagaacccaaggtcttgaggccttcgctaatgcgggaaagctcttattcgggtgagatgggctggggcaccatctggggaccctgacgtgaagtttgtcactgactggagaactcggtttgtcgtctgttgcgggggcggcagttatggcggtgccgttgggcagtgcacccgtacctttgggagcgcgcgccctcgtcgtgtcgtgacgtcacccgttctgttggcttataatgcagggtggggccacctgccggtaggtgtgcggtaggcttttctccgtcgcaggacgcagggttcgggcctagggtaggctctcctgaatcgacaggcgccggacctctggtgaggggagggataagtgaggcgtcagtttctctggtcggttttatgtacctatcttcttaagtagctgaagctccggttttgaactatgcgctcggggttggcgagtgtgttttgtgaagttttttaggcaccttttgaaatgtaatcatttgggtcaatatgtaattttcagtgttagactagtaaattgtccgctaaattctggccgtttttggcttttttgttagacaatgcagatcttcgtgaagactctgactggtaagaccatcaccctcgaggttgagcccagtgacaccatcgagaatgtcaaggcaaagatccaagataaggaaggcatccctcctgaccagcagaggctgatctttgctggaaaacagctggaagatgggcgcaccctgtctgactacaacatccagaaagagtccaccctgcacctggtgctccgtctcagaggtgggatgcaaatcttcgtgaagacactcactggcaagaccatcacccttgaggtcgagcccagtgacaccatcgagaacgtcaaagcaaagatccaggacaaggaaggcattcctcctgaccagcagaggttgatctttgccggaaagcagctggaagatgggcgcaccctgtctgactacaacatccagaaagagtctaccctgcacctggtgctccgtctcagaggtgggatgcagatcttcgtgaagaccctgactggtaagaccatcaccctcgaggtggagcccagtgacaccatcgagaatgtcaaggcaaagatccaagataaggaaggcattcctcctgatcagcagaggttgatctttgccggaaaacagctggaagatggtcgtaccctgtctgactacaacatccagaaagagtccaccttgcacctggtactccgtctcagaggtgggatgcaaatcttcgtgaagacactcactggcaagaccatcacccttgaggtcgagcccagtgacactatcgagaacgtcaaagcaaagatccaagacaaggaaggcattcctcctgaccagcagaggttgatctttgccggaaagcagctggaagatgggcgcaccctgtctgactacaacatccagaaagagtctaccctgcacctggtgctccgtctcagaggtgggatgcagatcttcgtgaagaccctgactggtaagaccatcactctcgaagtggagccgagtgacaccattgagaatgtcaaggcaaagatccaagacaaggaaggcatccctcctgaccagcagaggttgatctttgccggaaaacagctggaagatggtcgtaccctgtctgactacaacatccagaaagagtccaccttgcacctggtgctccgtctcagaggtgggatgcagatcttcgtgaagaccctgactggtaagaccatcactctcgaggtggagccgagtgacaccattgagaatgtcaaggcaaagatccaagacaaggaaggcatccctcctgaccagcagaggttgatctttgctgggaaacagctggaagatggacgcaccctgtctgactacaacatccagaaagagtccaccctgcacctggtgctccgtcttagaggtgggatgcagatcttcgtgaagaccctgactggtaagaccatcactctcgaagtggagccgagtgacaccattgagaatgtcaaggcaaagatccaagacaaggaaggcatccctcctgaccagcagaggttgatctttgctgggaaacagctggaagatggacgcaccctgtctgactacaacatccagaaagagtccaccctgcacctggtgctccgtcttagaggtgggatgcagatcttcgtgaagaccctgactggtaagaccatcactctcgaagtggagccgagtgacaccattgagaatgtcaaggcaaagatccaagacaaggaaggcatccctcctgaccagcagaggttgatctttgctgggaaacagctggaagatggacgcaccctgtctgactacaacatccagaaagagtccaccctgcacctggtgctccgtctcagaggtgggatgcaaatcttcgtgaagaccctgactggtaagaccatcaccctcgaggtggagcccagtgacaccatcgagaatgtcaaggcaaagatccaagataaggaaggcatccctcctgatcagcagaggttgatctttgctgggaaacagctggaagatggacgcaccctgtctgactacaacatccagaaagagtccactctgcacttggtcctgcgcttgagggggggtgtctaagtttccccttttaaggtttcaacaaatttcattgcactttcctttcaataaagttgttgcattcccaat

SEQ ID NO: 9 - protein, 489 aa, Homo sapiens
MKELDPKNDISEDKLSVVGEATGGPTRNGARGPGSEGVWEPGSWPERPRGDAGAEWEPLGIPQGNKLLGGSVPACHELKAFANQGCVLVPPRLDDPTEKGACPPVRRGKNFSSTSDLSKPPMPCEEKKTYDCSECGKAFSRSSSLIKHQRIHTGEKPFECDTCGKHFIERSSLTIHQRVHTGEKPYACGDCGKAFSQRMNLTVHQRTHTGEKPYVCDVCGKAFRKTSSLTQHERIHTGEKPYACGDCGKAFSQNMHLIVHQRTHTGEKPYVCPECGRAFSQNMHLTEHQRTHTGEKPYACKECGKAFNKSSSLTLHQRNHTGEKPYVCGECGKAFSQSSYLIQHQRFHIGVKPFECSECGKAFSKNSSLTQHQRIHTGEKPYECYICKKHFTGRSSLIVHQIVHTGEKPYVCGECGKAFSQSAYLIEHQRIHTGEKPYRCGQCGKSFIKNSSLTVHQRIHTGEKPYRCGECGKTFSRNTNLTRHLRIHT

SEQ ID NO: 10 - protein, 260 aa, Homo sapiens
MARPHPWWLCVLGTLVGLSATPAPKSCPERHYWAQGKLCCQMCEPGTFLVKDCDQHRKAAQCDPCIPGVSFSPDHHTRPHCESCRHCNSGLLVRNCTITANAECACRNGWQCRDKECTECDPLPNPSLTARSSQALSPHPQPTHLPYVSEMLEARTAGHMQTLADFRQLPARTLSTHWPPQRSLCSSDFIRILVIFSGMFLVFTLAGALFLHQRRKYRSNKGESPVEPAEPCHYSCPREEEGSTIPIQEDYRKPEPACSP

What is claimed is:

1. A method of providing a treatment to a patient having non-small cell lung cancer comprising:
extracting total RNA from a tumor of non-small cell lung cancer of a patient after the surgical resection;
generating complementary DNA (cDNA) of the extracted total RNA from said patient tumor;
quantifying of mRNA expression of 7 genes of ABCC4 (SEQ ID NO:1), CCL19 (SEQ ID NO:2), SLC39A8 (SEQ ID NO:3), CD27 (SEQ ID NO:4), FUT7 (SEQ ID NO:5), ZNF71 (SEQ ID NO:6); and DAG1 (SEQ ID NO:7);
normalizing of the quantification of said 7 genes with the quantification of a control gene UBC (SEQ ID NO:8); and
utilizing said normalized 7 gene mRNA expression quantification to determine whether said patient will benefit from receiving adjuvant chemotherapy or not.

2. The method of claim 2 further comprising administering to said patient a therapeutically effective amount of one of the following adjuvant chemotherapies (a) cisplatin and Taxol (paclitaxel), (b) cisplatin and Taxotere (docetaxel), (c) carboplatin, (d) carboplatin and Taxol (paclitaxel), (e) carboplatin and Taxotere (docetaxel), (f) Taxol (paclitaxel), and (g) Alimta (pemetrexed).

3. The method of claim 2 wherein said quantification of mRNA expression of three genes of ABCC4 (SEQ ID NO:1), CCL19 (SEQ ID NO:2), and SLC39A8 (SEQ ID NO:3) within said 7-genes.

4. The method of claim 2 wherein said quantification of mRNA expression of four genes of CD27 (SEQ ID NO:4), FUT7 (SEQ ID NO:5), ZNF71 (SEQ ID NO:6), and DAG1 (SEQ ID NO:7) within said 7-genes.

5. The method of claim 1 wherein said quantification of mRNA expression of ABCC4 (SEQ ID NO:1) and utilization of said normalized ABCC4 gene mRNA expression quantification to determine whether said patient will benefit from receiving adjuvant chemotherapy of one of (a) cisplatin and Taxol (paclitaxel), (b) cisplatin and Taxotere (docetaxel), (d) carboplatin and Taxol (paclitaxel), (e) carboplatin and Taxotere (docetaxel), and (f) Taxol (paclitaxel).

6. The method of claim 1 wherein said quantification of mRNA expression of FUT7 (SEQ ID NO:5) and utilization of said normalized FUT7 gene mRNA expression quantification to determine whether said patient will benefit from receiving adjuvant chemotherapy of carboplatin.

7. The method of claim 1 wherein said quantification of mRNA expression of ZNF71 (SEQ ID NO:6) and utilization of said normalized ZNF71 gene mRNA expression quantification to determine whether said patient will benefit from receiving adjuvant chemotherapy of (a) carboplatin and Taxol (paclitaxel), (b) carboplatin and Taxotere (docetaxel), (c) cisplatin and Taxotere (docetaxel), and (d) cisplatin and Taxol (paclitaxel).

8. The method of claim 1 wherein said quantification of mRNA expression of SLC39A8 (SEQ ID NO:3) and utilization of said normalized SLC39A8 gene mRNA expression quantification to determine whether said patient will benefit from receiving adjuvant chemotherapy of one of (a) Taxol (paclitaxel), and (b) Alimta (pemetrexed).

9. A method of providing a treatment to a patient having non-small cell lung cancer comprising:
providing protein expression of ZNF71 (SEQ ID NO: 9);
quantifying said protein expression of said ZNF71 with automated quantitative analysis (AQUA) correlated with said ZNF71 mRNA expression in a patient tumor; and
determining a prognosis of said patient from said protein expression of said ZNF71.

10. The method of claim 9 including wherein said prognosis of said patient is either longer survival or shorter survival.

11. A method of providing a treatment to a patient having non-small cell lung cancer comprising:
providing protein expression of CD27 (SEQ ID NO:10);
quantifying said protein expression of said CD27 with ELISA correlated with said CD27 mRNA expression in a patient tumor and a cancer-free tissue adjacent to said tumor; and
determining a prognosis of said patient from said protein expression of said CD27.

12. The method of claim 11 including wherein said prognosis of said patient is either longer survival or shorter survival.

13. The method of claim 11 including administering to said patient a therapeutically effective amount of an adjuvant chemotherapy.
